United States Patent Application Publication US 2026/0275333 A1 - sequence listing, part 17

SEQ ID NO: 3045 - RNA, 64444167 nt, Homo sapiens (residues 34,370,225-36,518,363 of 64,444,167)
  source 1..64444167: mol_type = mRNA
atttaatcttgccagacctcagtttatacatctgtaaaataggtaagtattgattcctgtctccatccctggcattgttgtgtggatcaaataaaataatacctattaaatctttagaaaaggaaatgaattcatgacttaaaatgttatcttggccaggcacggtggctcatacctgtaatcccagcactttgtttgggaggccaaggtgggcggatcacttgaggtcaggagtttgaaaccagtctggtcaacatggtgaaactccatctctactaagaatacaaaaattagcagggtgtgatgtcatgtgcctgtattcccagttacttgggtggctgaggcaggagaatcatttgaacccaggaggtggacactgcagtaagccaagatcgtgccactatactccagcctgggcaacagagtgagagtctgtctcaaaaaaaaaaaaaagaaaagaaatgttatctagatccacaaggtgagagaagttgagagtagtattgtgaaggaaaacatgaggacaagacagatcactttaaaaggtcaggagagaaggaagactactgggtaagaaaaaaaaagtagaacataaagttaagcagtaagagaatagggagtgaatgaagttgagcaggtgaattgttagataagaaagctgaggctgggcgcggtggctcacgcctgtaattccagcactttgggaggccgaggcgggtggatcacgaggtcaggagatcgagaccatcctggctaacaaggtgaaaccccgtctctactaaaagtacaaaaaattagccgggtgtggtggcgggcgcctgtagtcccagctactcaggaggctgaggcaggagaatggtgtgaacctgggaggcagagcttgcagtgagccgagatcacaccactgcactccagcctgggcaacagagccagactccgtctcaaaaaaaaaaaaaaaaaaactgaataggaagatactggtaaaatagaactaaaatatgatccagcattgccacttttgggtatatatccaaaggaaataaaatcacttcttctttttttttttttttttttttttgagatggagccttccccaggctagagtgcaatggcacgatcttggctcactgcagcttctgccccctgggttcaagtgattctcttgtctcagcctcctgagtagctgggactcgggaggccaggcgtgcacccaccacacctggctaattttgtattttcagtagagacggggtttcaccacattggccaggctgctcttgaactcctgacctcaggtgatctgcccgcctctgcctcccaaagtgctgggattataggcgtgagccactgagcccggtcctgttcttttttataatcaagagaaaggaaggagatggtggaatgatttgtgatagctactataaagcaatttaaaaaatatttaaaagtattattaaagtatttaaaatatctttaaaatatttctcagcatatccatttcatctcaagctcacaaagcagttctttgtggaaaggtatttgagccaacattcaggaaacctgcgttctaccattggtattactggtcacttaaattctgtgatcttgggcagctcacttaaatctccctgggcctggtttcctcacttatctattgaatgttttgaatatgatttctcaggttctttccagctcactctattatattctgtgctttatgtgctaactcactgatttttcatggctttgttgacatcacaatatatgactgatatcagaaatatcttataataaggcttcggccggccgcggtggctcatccctgtaatcctagcactttgggaggctgaggcgggcggatcacgaggtcagaagatcgagaccatcctgactaacatggtgaaaccccgtctctactaaaaatacaaaaattagctgggcgtggtggcgggcgcctgtagtcccagctactcgggaggctgaggcaggagaatggtgtgaacctgggaggcggagcttgcagtgagccgagttcacgccactgcactccagcctgggcgacagagtgacagagggatactttgtctcaaaaaaaaaaaaaaaaggcttcataatgtctgatgctttataaatgagaaaccatgttattttaagttctacttttttttttttttgagagggaatctaactctgtcacccaggctggagtgcagtggcgcaatctcagctcactgcaacctccgcctctcgggttcaagcaattctcctgcctcagcctcctgagtagctgggattacaggcacccgccaccatgcctggctaattttttgtatttttagtagagatggggtttcaccgtgctagccaggatggtctcgatctcctgacctcgtgatctgcctgcctcagcctctcaatgtgctgggattacaggcatgagccaccgtacccggccttttaagttctactttaaacattggcactgagagacctgtaggaaacgtaagtatagaaagtttaagtttgtaatatttgacaaggatctgttgagctgctattgtgctaggttccaaggggtactcaaatataaaactcctggtttaaggattttgtcaggaaaacagacttccttgccagtgattgattattataaaaaggaagttggtaaatgttacaagagtttcattgcattgcaatttaagaaattaagttcagattttttggttcctttaacatgattgaatgtattccttttttttttttttttgagacggagtttttctcttgttgccgaggctggagtgcaatggtgcaatctcagcttactgcagcctccacccactgggttcaagcgattctcctgcctgagtctcccaagtagctgggattataggcatgtgccaccacgcccagctaattttgtatttttactagagatagggtttcactgtgttggtgaggctgatcttgaactcctgacctcaaataatccacctgcctcgacctcccaaagttctggattacaggcataagccactgcacctggccaaatgtattttttttttttttttgaggcagagtcttgttctcgcccaggctggagtgcagtggtgtaatcttggctcactgcaacctccgtttcctgggttcaagccattctcctgcctcagcctcctgggtagctgggattacaggtccctgccaccatggccagctaatttttatatttttactagagatggggtttcaccatattggccaggctggtctcaaactcctgacttcaggtgatccgcctgccttggcctcccaaagtgctggaattataggcattcggcctaacataattgaatgtattttaagtgctgctgtatgctagacattgcagggacttatggtgaaaaagcaatctctgccctccagcaactcgcattttttttttccatgtctggaaattgcttaccctaatagatctatccttctgtcccagaaaagagaagaattttaatactatgtcgtcacttacaggttaagaattcatctacatattgagcttaactcactccagaaatatctactaacttgcttgctttctgagaaaatgtttattattttactggattctgcaaccttttctttgtcagttacaagagaacattttttttttttatttttttttaagatgcagtcttgctttgtcgccaggctggagtgcagtggcacagtcttggctgactgtaatctccgtctcccaggttaaagcgattcccctgcctcagcctcccatgtagctgggactacaggtgcccaccaccacgcctggctaattttttgtattttagtagagacgaggtttcaccatgttggccaggatggactttttattttttatttttttaagacaagataagctccagaaataaccatctgcatttaggtgaactttgatttgcttgttaggccttcattcgtgcaaagaaagagtaggttctacaattttgtcttgattatttttccaaataatcaaatttagttggtcacaaaggaaaggattttagtctaaaggattatattgtaggagttaacagtatttactggagttaggttgattttgaattttgactctactgtgtagtggtggtatgatcttggccaacttgcctaacttctttttgccttagttttctcatctgtaaattgggaatagtaatagcatatatacataggtattatgtgtttctgcttgaacaagacttggctcacagtgtgaagtgttagtcgttgttttcattatcatcattaccatcaaccttatctttcttaaagttatgatctgagttcataaatcattcagtaaacctatttaggctgagcattgtaaatttaaatgcctgcaagggctggatgaacatttagtaagtaatgacagatcagactgggactttaagtgaactagggaattcattcccctccaagggagcagctgttaaagcagctttggcttacaattttttttttttttttttgagacagagtttcacttttgttgcccaggctggagtgcagtggcatgatcttggctcactgcaacctcaacctctgcctcccgggttcaagcaattctcctgcctcagcctcccaagtagctggaattacaggtgctctccaccacgcctggctaattttttgtatttttagtagagatagggtttcatcattttggccaggctggtgttgaactcctgacctcaggtgatccacccgcctcggcctcccaaagtgctgggattacaggtgtcagccaccacgcctggcgtgatttttttttttttttgagacagaatctcgctcttgttgccccagctggagtgcaatggcgcaatcttggcttaccataacctccgctttccgggttcaagcaattctcctgcctcagcctcccaagtagctgggtttacaggtgtgtgccaccacgcctggctaattttgtatttttagcagagacgaggtttctccatgttggtcaggctggtctggaacttccgacctcaggtgatccgcctgcctcggcctcccaaaatgctgagattacaggcgtgagccaccgcacctggccttttttttttttttttttaatggaggtaaaagtaagtatgtgaggttatgtatatgttatttagctcgatttagccattccacaacatgtacatattttaaaacatgttatgggctggtcatggtggctcatgccataatcccagcactttgagaggctaaggcaggaggatctcttgaggccaggagtttgagaccagcctggataacatagtgagaccccatctttattttatttcaataaataaataaaacctgttttacatgataaatatataccttttttgtcaattaaaataatttaaaaatactacttaaggtcttgggaatacactcacaatgtattggtagttaaaatttttttttttttttttttttttttttttttttttaccagttgctgtggctcacttctataatcccagcactttgggaggccaaggtgataggattgcttgagcctcggagtttgagaccagcttgagcaacatagcgagatcccgtcattatatttttcaaaattaaaaaggaaagttttcagaaggttaaaaaaaaaattgaggcaaaattcactactttaaagtgtacaattcagtgttggcttactattgaccttggggagagtgcagaccatgtgcagactgaacatcttaatttttttctaaggagaagctagaaatcaagattttgtaagaaatttttattgttaaatgttggcaacttatgaattcatagtgtaaacactgtgggccaaacaaattaccactgtgggcagaatttgtcttgtggcttgctgctttacaacctctgatctggggcttgactttctgcagcataacccatgttttctgccctctgagaagaaagttcttacccacgtaaagatttaaccagcctcggcagcatggtgaaacactgtctctacaaaaaagcctcataaaaatcagccaggcatgatggtggtgtgcgcctattgtcccagctgaagtgcaagggtcgcttaagcccaggaggttgagactgcagtgagctcatgtcgctgcactgatatcatgtcactgatatgtcactgcactctagtctgggcaacagagtgtgaccgtgtctcaaaaataaatacataaataaataaataaataaaacagttcaaacaatacctcaaagcagtctagtactgaatgagaggtatgtagaataattattaaggcagatagaaggagggaagttagttagttattcagaatatgccaaggtgcagaggcaggaatggacttcagggggtggagtttaattttagaggatttgtgtgagcctggtaataggcaaaagttttgaaaatttgagaagagtcaagcctcttattttgaataaccttgagacctattggctgataggattaaatggtattttgtgaagatttatttggcaaaattgaggtctgtagtatttactatggttggaggcagggagactaggctatggaggtgtcagtgggaatgaaaataaagggggaaaagcttgtataagagacaaaaggttgcattaaagagggccaattttgaaagctttttctctattgacttttgtacaaactgggatatgggaagatactgtgtacaggctatattcctcttttcatgttgtgaatcttgctttatcccttactcagtcccaacagtgtccttgttgatggattacatacgttttcttacgatttcccagcttgcacaagtagaatagaaagaaaaaccaggccaggcatggtggctcacacctgtaatcccagcactttgcgaggctgaggtgggcggatcacttgaggctggagtttgagaccagcctggccaacagggcgaaacctcgtgtctactaaaaatataaaaaattagccgggtgtggtgttacactcctgtagtcctagctacttgggaggctgaggcatgagtattgctggaaacagggaggcggaggttgcaatgagccgagattgaactgctgcactccagcctgggcgacagagcgagaccctgtctcaaaaagaaaaaaccaccaaagtagtgtaattgctcatcacatttcttgtttggggtttttggttatctcggttaacctctggtatatttcattagaccttagtttatacattgaattttcatatttaccaaggtttggaaacaatgacaaatggcttgctcttagaaagatgtagaattttcttgcagaaacttgagataactgatatggctgggcgcggtggcttacacctgtaatcccagcactttgagagtccaaggtgggcagatcgcttgagcccaggtattcaagaccagcctgggcaacatggagaaaccctgtctctacgaaaaacacaaaaaattagttgggcatggtggcgtgtgcacctgtagtcccagctacccaggaggctgaggtgggaggattacctggtcccgggaggtcaagactgcagtgatttacctgtgattgtatcacagtactccagcctaggcaacagagtgagaccctgtctcaaaaaaaaaaaaaaattatgattcagaatgtctgaagaaaccaataaatgtagaaaggtagaatatgttcagcataacctgagaaagtgatttttaggatgttattttctaaataagatttagattttgttctgtttatacttctcatgaaacttttttttttttttaacatacctgggaagttattcctcattcttggccaaatacaaaatgtcattattttagagactatagtctttttcgcaagtaagctgaatagtgtgttaggtatagtctgagtattaagaatatctgagatctgtattaaaaacagatgtaggccgggcacagtggctcacgcctgtaatcccagcactttgggaggccaaggcgggaggatcacctgaggtcaggagttcgagagcagcctggccaacatggtgaaaccccatttgtactaaaaataccaaaaaattagccgggtggggtggtggcgcacctataatcccagatactcggtgggctgaggctggagaattcctgaacccaggaggcagaggttgcagtgagcagagattgcgccattgtactccagcctgggcgatgagcgaaactctgtctcaaaaaaaaaaaaaaaaaaaaaaagatgtaaaaaaaaaaaaagaatatctgagatatagcaaagtttttctcatggatgaataaaaatactgaactgggcctttaaaaaagtacagaaaattgcctgtcatagaaatgcagcagtagggtcaaatgagctaaatctaaatctcatttaatgaaaaaggcactttccttttatttttgaaggatggtctaacctagtttttggaattcatttgttctgcaattaaaagagatttttaggtggttcatttaattatagctgttttggaaatgggaaggaaaataatgtgagagagagattaactgcatttgcttctgtggaaagtcagtagtcaaaaggagagtctggattatttatttatttatctaaaaatatggaacacttggtgaattttaaccttatctttgctcagaggatgtactaatctctgtgttctaattttttagtatatgtgctgctgaagcaaacacacagattatttttttctgttcttaagttttttggaggaaagctatttactataggtcttaattaaaaactatattctgtatatattgaaatgtgcagaaccctgctgctgctgtttttcgttacccagaatgttgcttacatctctctactatcatcttctctccctttgttttagcccttggggtttatgtttttttattcctttatttcatttttttctgaggttttggaagggaatggagaatggggtgtgttcattctgcctggctggttgattttatatagaaattgatgttttcatctctaagggacaaagaaaattaggaaaatatcctagttttatttttattgtggtaaaatacacattacatacagtttaccattttaaatattgttaagtcttcagttcagtgacattaagtacatttaccttgttatgtgaccattaccactatcggtctctagaactttttcatcatccagaactgaaacttgtacctattaaacaataattatccatttcacctcctccctgctctggtaactactattctgttttctgtctctgtgaatttagctattctaggcacctcatcgtaaaagtggagtcatacaatatttgtcctttttttttttttttttttagacggagtctcgctctgtcacccaggctggagtgcagtagtgcgatcttgactcactgcaacctccgcctcctgggttcaccccattctcctgcctcagcctcccaagtagctgggagtacaggcacccgccaccactcccggctaatttctttttgtgtttttagtagagacagggtttcactgtgttagccaggatggtctcaatctcctgacctcgtgatctgcctgccttggcctcccaaagtgctgggattacaggcgtgaaccactgcacccggcccccccccccctttttttttgagacagagtctcgctctgtcaccaagctggaatgcagtggtgcgatgttggctcactgcaacctccgcctcccaggttcaagcaattctcctgcctcagtctcccgagtagctggaactacaggtgtgtgccaccacgcccagctaatttttgtattttttaatagagacagggtttcaccatgttgaccaggatcgtctcaatctcttgaccttcctcagctgggattacagccgtgagccactgcgcctggccaatatttgtccttttgtgtctggtgtatttcacttagcataatgtcttcaggtttcatgttgtaccatatgtcagaattttattcctttttaaatgctgagtaatattccattttatatattttagtaattttttgaaggactgaataggctcaagtacagcaatgacatattttttgttcatttccctgttatcttttttgctgtgaactgtgattttaaatcatgaaattaacattgaactatgctagagatactagttttgggccacatcttctgttctgaccttaggtaatccactttgcttgggttgtttgtcttactcagttgtaagagtttattgtaaattctggatacaactcctttatcagatatgtgttttgcagattttatctcctagcctattgcttgtctttccattttcttaatgatgtcttttttttttttttttttttttgcaaaaatagagatggggtcttgcattgttgcccaggctggtcaaactcctgggctcaggtgattttcctgcctttgcctcctaaggtgctatgattacaggcatgagccaccggccctgcccaagaagttgagtgcaatcaaaattagaaactttgacccttttttaatttatttttgagacagagtctcactctgtcacccaggctggagtgcagtggcacaatcgtggctcactgtaatctccacctcccgggttcaggagattctcctgcctcagcctcctgagtagctgggattacacgtatgtgtcactgcacctgggtaatttttgtatttttagtggagatggagtttcaccatgttggccaggctggtcttgaactcctggtctcaagtaatctacctgcctcagcctttcgaagtgctgggattaccggtgtgagccactgcgcctgtttgaaatttcaactctttagaagacatcattaagtccaggcatggtggcttgcgcctgtaatcccagcagtttgggaagctgaggcgagaggatcgcttgagcccaggagttggagaccagcctggccaacaaagtctacaaaacgaaacaaaacaaaaaaacaactatctggacgtggtggtgtgtgcctgttttttttgtttgtttgttttttgagatggagtcttgttctgttgcccaggctggagtgtggtggcgcaatctcagctcactgcagcctccacctcccaggatcaagtgattctcctgctgggactacaggtgtgtgccaccatgcctggctaatttttttttttttgagatggagtcttgctttgtcgcccaggctggagtgcaatggcgcgatctctgctcaccgcaacctccgcctcctgggttcaagtgattctcctgcctcagactcccgggtagctgggactacaggcgcacgccaccatgcttggctaattttttgtttttttagtagagacggggtttcaccatgttggccagactggtctcaaactccttgcctcgtgatccgccctccttggcctcccaaagtgctgagattacagacgtgagcgaccgcgcctggcgtgtgtgcctgtatgtagtcccagctatttgggggagaatgaggcagtaggatcccttgagcccaggagttccaggctatagtgagccatgatcacaccactgtaccctagctctgtcaacagagcaagtccctgtctctaaaaaaaaaaaaaaaaatggaaagaaatactcaaaacactcaatttctcaattgttttctttaatgaataacgtgtttggtgtcatatctacaaaaatctttgccttactggacaatcagtaaatctttcttagatttccatttgtttacctgtgagaacaaataagatgtatgtggtattttgccttctttggaatagtatttctattctgtttctttttgaatttaatcggaggggctaatcttgggatagaatgctaaggtgaaaatctacagactcaaattggaatgtagaattgactttgctttcataatcctagttgtttcctaataggtaagtggtaatttggttcctctccccttcctagtattgagggctcttggatgtaaactcttatttgtgtcattttattctaggtttttgacacaatctgaataacaatgctttttggctccttttaaggaaaatgcatgaattttgttaataaagtgcatatacatattactcagtgactcagtattgactttcagtttacttgataattcttttttcttttcttgagatggagtctcgccttgtcacccaggctggagtgcagtggcgtgatctcagcatactgcaacctctgcctcctgggttcaagtgattctctgtctcagcctctcaagtggctggaattacaggcgcctgccaccatgcccagctaatttttttgtatttttagtagagatggggtttcaccatgttggccaggctggtcttgaactcctgaccacaagtgatccacctgccttggcctcccaaagtgctgggattataggtgtgagccaccacgctcagccaataattctttttattattactattattattattattattattattattattttgagacagagtcttgccttgtagctcaggctggagtgcactggcatgatctctgttcactgaaacctctgcctcctggcttcaagcaattctcctgccttagcctcctgagtagctgggattacaggcacgcaccgccacgcctggctaatttttgtatttttagtagaaacggagtttcaccatgttggtcaggctggtctcaaactcctgaccttgtgatccgcctgcctcggcctcccaaaatgctgatattacagccatgagccaccgcgcccagtccttttttaaattttttttcagacagggtcctactttgttgctcagccgggaatgcagtggcatgatcatggctcactatagtcttgacctctcgggctctggcgatgctcctgtgtcagtctcctgagtagctgggaccacaggtgcataccaccatgcctgggtagtttatttttattttttgtagagatagtgtcttgctatgttgcccaggctggtgttgaactcctggtctcaagcgaccctcctaccttgacctcccaaggtattgggggtgggattacaggcgtgagccaccatgccagtcttgggcttgatagatttttttttttttttttttttgagacagagttttgctcttgttgctcaggctggagtgcaatggtgcaatcttggctcactgcaacctccgcctccttggttcaagcaattctcctgcctcagcctctcgagtagctgggattacaggtatgcgccaccacgcccagctaattttgtattatcagtagagacagggtttctccatgttagtcaggctggtctcgaactcctgacctcaggtgatctgcctgcctcggcttcccaaagtgctgggattacaggcatgagccactgtcactgtgcctggctgatatatatatgtgtgtatttattattattttttttaatagaaatggggtttcactgggttggccaggttggtctcggaactcctaggctcaagagatcctctcaccttagcctcccaaagtaccaggattacaggcatgagccaccaggactggtctgtaattcttttttttttttttttttttttttgaggtggagttttcactcttgttgtctaggctggagtgcagtggcacaatcttggctcgtcgcaacctctgcctcctgggttcaagctattcttctgtctcagcctcccgagtatctgagattacaggcatgcaccactgcacccggctaattttgtatttatagtagagacgggatttattcatgttggtcaggctgctcttgaactcctgacctcaggtgatccacctgcctcagcctcccaaagtgtttttggattacaggcatgagccactgtgtccggcctcttttttttttttttttttttaagtcaagtgaagcagtgggagtggagaaggaacaaagaaatctgtaactggttgtgatcagttagttgtaaataccagtgcagcagttggaccagccgaggcctgtaattcttttttttttttttttttttgagatagagtcttgctctgtcgcccaggctggagtgcagtggcgtgatcttgtctcactgcaacctccgccttccggcttcaagcaattctcttcctcagcctcctgagtaactgggattacaggcatgcgccaccatgtccagctcatttttgtatttttagtagagacggggtttgaccatcttgggcaggctggtcttgaactcctgaccttgtgatccacccgcctcagcttcccaaagtgctcagattataggcttgagccgccgtgcccagctgcctgtaattctcaaataatgtttagaaatgatctgaggaaagtttgctggaaggatgaggcatggtggatattagggtcttttttttttttttttttttgagacggagtctcgctctgtcgcccaggctggagtgcagtggcatgtcctcagctcactgcaagctctgcctcccgggttcttgccattctcctgcctcagcctcccaagtacctgggactacaggcgcccgccaccacacctggctaattttttttgtatttttagtagaggcggggtttcaccgtgttagccaggttggtcttgatctcctgacctcgtgatccacctgcctcggcctcctaaaatgttgggattacaggcgtgagccaccgcacctggctattagggtcttatattttgagaatgtatagatatttagagatggtcagaaacaagaaaattttttttttttaagaccgagtctcactctgtcgctcaggttggagtgcagtggtgtgatctcagctcactgtaacctctgcctctgagattcaagccattctcctgcctcagcctaccgaggagctgggaccacagtaggcacatgccaccacgtccagctaattttatgtgtgtgtgtgtgtgtgtgtgtgtgtgtgtggttttttttttttttttttttagcagagatagggtgtcactatgttggccaggctggtctcgaactcctgaccttaggtgatccgctcaccttggccttgcaaagtgctgggattacaggcatgaagcatcacctctggccagaaacaaggattccttagagccaggaaattcaacattatatataattagatgtataatttcacacaagcattgtttgcaagagaacaatacttatagtagtacaacaatatttatatttattgtggcaaatgctttaaactctagcagtagtcaaagctagaaacaacttgtaataatagttaattttgaaatgtttgtcagaaagctgtttgtcagaaaggggaagagatcaccttctggaatattaggtacagagttcaaaccagcaaatgaatgctaaaagttagatcctggtgccaatttccttaaattctgtgttcatactgttgaacctcgaaagttgtagcttcctctttttctctttgaacagtataattgtccttttttgcatatgctttagaatccatactgatgtatttggttggaaagtgggaaaggagcttttagtgttctgagatcattgtgtgatgttcagaaccaaagtgtcactgttacatggtagagaatggttcatattctacctccttgttaagtcaattaagtcaatttttcctagtaaatgggaaagcaaccgccttccctatcatgaggggttttgggtttcttcccacttgctttgctgagaaattaaattatggaaatgggtatttaccctctgctccaatctaaataaacttttattccttctaccaataccttcagtagcccatgcaccaaagtcggctcctttgtttttttttttgttttgttttgtttttttgaggcagagtcttgatctctcgtccaggctgtagtgcagtggtgtgatctcagctcatggcagtctctgcctcctgggatcaagcaattctcagcttccaagtagctgggatcacaggtgcctgccaccacacctggctaaggtcctttgtgattattagcagagaatgggatctaaaaatgttcctgtgttccttctagctagtctttgctactgtgcccctagataatgggatctagtttttcacttgagtagtgtttttgggaacatgacagagtagccctgtccaagggagacatactactcggtatgtatttctaatttaccacacatgcttctgtattttatagtaagattgtttgagagtttgacttcattagggtttagttctctgaataccactatatactttagctctttgaactctggactttctgtcacaagcagtttttctccttagtttttttgtgtcttctgaaatgtcattttggtggattcttttaagaaaatatagggctatattaaattacttaaaggttttctaagtcacaatagatgtggcctgtaaaaatatctgattatgttgggtgtgttatttctgaaaataaaccaagcaaatttcacaatatcctgtttaataatttctctataaataagatacatatttaaaataaggctataaatgtttgttgcttaagagacaagatattactgaaattatcttctgaagtatgtctatccctttccacatttttgtttccactgccttttcagtaagatgttaaggttaattttacctctggcagtgttttagcaccttctttctatattgggcattctatctgtcacatttttctagtgtagtagtaaacattactcaaaataaatgatttataggccgggtgtgatggctcatgcctgtaatctcagcactttgggaggccgaggcgggcagatcacctgaggtcaggcattcgagaccagcctggccaacatggcaaaaccccatctctactaaagatacaaaaaaaattagccagatgtcatgcatgcctgtaatcccagctactagggaggctgaggcaggagaattgcttgaacccaggaagcagaggttgcagcgaggggagattgcgcccctgcactccagcctgggcgacacagtgaatgtctgtctcaaaaaaaaaaaaaaaaatttataaagtgctaagtattgacccagctgggcacagtggcttatccttgtaatcccagcactttgggaggccaaggcaggaggacgacttacttgagcccaggagttcgagactagcccgggcaatatagtgagaccctgtctctatctccctgtaaaaaattagatgggcctgtggtatgtggctgttagtctcagttactcaggaggctgaagcaggaggattgtttcagcccaggtggttgaggctgcagtgagctcgatcactctagcataggcaacagagcgagaccctgtctcaaaaaaaaaaaaaaagaccctgttttgagtttctttgtaactgacagactaataggtaatagagttttaaaatattgttactagatttttttttttcttttttgagatggagtctcgctctgtcacccagactggagtgtagtggtatgatcttagctcactgtaacctccgcctcctgggttcaagcggttctcttgcctcagcctcccaagtagctgggattacaggtacctgccatcatgcctggctgatttttgaatttttagtggagatagggtttcaccatgttggacaggatggtcttaatctcttgaccttgtgatccacccgcctcggcctcccaaagtgctgggattacaggcgtgagccacagcacccagccatgatttagattcaaactgtatcttcattggttccagtcacaatggtttacagtgctaagtaaagctatagattgcatactgctgtacttgtgaaggctttttttttttttttgagacacggtctcactgtgttgcccaggctggaatgcagaggtgcagtcacggttcactgctgcctcaacttcctgagttcaagcggtcctcccagtttggcctcccatgtagctgggactataggcatgcaccactgcatctggctaatttttaaattttttgtagagatgggagtctcactgtattgcccaggctggtcttctgaaggcttttagtttgtttgtttgcttgtttgtttttaaatcttgtttgcttgcttttcttttctttcttttctttttttttgagatgaggtcttgctctgtcgcccaagatggattgcagtggccttatcacagctcactgcagcctctacctgctggtctctggcgatctttgtgcctcagcctccccgttaactgggacaacaggcacataccaccacatccagctaatttatttttattttctgtagagacaggattttgctctcacatatctgtccaaccaataaacaaaaaagttatgatactcagggcaaagttttctctaactcctcaaaaggacttgaatttaggacatctttcttactgagacatacaaaggcttaaaagtatgtattacaatccaaaacactcaccactgtctaacatttctcctccaaatgagagcactaatagcctattcaaaagagtctctaattatgaatgtgaagttacaaagaatgtttttttgttcttaggtctatgaagataacacaaaggcaacaagtgaaaacacaatgcataaagtttcactttagtccccttataacagaaaacaagagatgaagataagagcacttttgctgtcctagaacttaaaatgaaaatctaagagagacccataatataaatacaatcatcccttggtatatgtggggattgcttctaggaccaccacatataaccacgtcagtgcatgctctgaagtacgccctgtggaacctgcgtatgtgaaaagtccttcccatagacttgggtttcacatcccatgagtactgtattttcaattggtgttttttatttttattttttattattttttaaaaaattttaattaaatagaaatgaagtctcactatgttgcccacactgctttcaaccttctgggctcaagcaaccctccctgctcagccttccaaagtactgggattacggacgtgagccactgctcctggcctcaatctgtgtgtggttgaaaaaaggctgcatataagtggatctgtgcagttcaaaccagttgttggacaagagccaactgtaattagaattataaaaattgatgccatgctctctgtgtgagtaacaatgcagtaagaatatgcagattttagtcactaattttgacttcctgggaaaggaactgcagactagatgctacaaaagagaaacacttgagggtgaaaaagattaactgtaagaaaatgggaaagagactaagaaatccagtttcttagaaaaacatattcagtagaaacttaggaacagaagtgatgtcttggttggccatgagatagtagatccctacaaccactagaaagtgtccattagggacattatccctttagggtaatgtgcaggtggtcatgtttcagactttattactcaaagtcatgaccactggggaggttagataagcatctttttaaggggttatctatgttacaggcattgtttaaagactctgctgaagaacaccttggtatgcaggaatcaaacattggtcagggccaggcactttgggaggccaaggtgggtggatcatttgaggtcaggagtttgagaccagcctggccagcatgatgaaaccccatctctactaaaaatacaaaaattagctaggtgtggttgtgggtgcctgtagtcccagctactggggaggctaaggcaggagagtcgcttgaacctgggaagtggaggttgcagtgagctaagactgtgccactgcactcagccagggcaacagagtgagactctgtctcaaaaaaaaaaagaaaaaaattggttagcatgatggtttcacttcaagatggcatcactcttgcatgcaacaggcagttttcctacaactgtctttaattctgcagatactctgtcagtctttaaaatgaaactataaattatagattatctacatttatggatgaagaaagtgtggcttagagaaattcagtaatttgctcaagttcacagagtaacagttcaggaatgttgatctagatctgtctgacttcacagttggcatacataattaccatgctataatgtcttctgtaatacatggtatagaattgacaagaataatctttttttttttttttttttttttttgagatgaagtctagctctattgcccaggctggagtgcaatggcacgatgttggttcactgcaatctcagccttccaggttcaacgatcctcccgcctcagcctcccaagtagctgggattacaagcgtgtaccaccatacctggctaatgtttgtatttttagtagagacgaggtttcactatgttggccaggctggtctcgaactcctgacctcaggtgatccacctaccttagcctcccaaagtgctgggattacaggcttgagccactgtgcccagcctagatttaatcttttttttttcttttttgagatggagttttgctcctgttgcccaggctggagtgcaatggcgcaatcttggcttactgcctcccgggttcaagcgattctcctgcctcagacttccgagtagctggaattacaagcatccaccaccacgcccagctaattttttgtatttttaatacagacggggtttcaacgtgttggccaggctggtgttgaactcctgacctcaggtgattcacccgtcttggcctcccagagtgctgggattacaggagtgagtcaccacgcccggcctagatttaatcattttaaccatgtatgcagttgtaaataatagaactaagaatctggcgctcaggggagaggatgggacttgaagtgtggattatctatttttttctactctgttttatgctgtttttaaaattgtacaagtcaacagtgatacatgtcctatttttagaacttcaaacaatacatacaaaactacagttccctatgaccacgtacttgagtacacaggtgccctcctcctgaatggaatgtatactttttctgcgtttatttacaagtatttgtacccataggaatatatagtgttttagtttgcaaaaataatatcatactgtacatactgatggggtgatcattttgtgatctaccccaccccaactcatgcatgttgttctgcagctttaaagatgttcttgggatctctcaatttcagtcattaataagttacttattttgatacctgcatagtaatctgttctgtggtatgaatatgtgatttaatatatgaatatgccaattgataatatacattatttctaatttttttgatattatacaaatagtgatttttattcttttcaagaatttaaaatgcttggtgaattttagttatgtaaaactagtatgtatatgtacataaattattgaaattactaggatgtttttggcagagcacctcacaattctaccataatgattctctgtaattatctggagagtcattgttcttaaaaatgtttgcagtctgtgctttcattaatcttttctacatgaagttaattttagtttttaaaatatacttaatttttgtagagatttaaaattttttgcaactttgtaattaatgttaatttatatttagaataatttatactgtactattagggcattttcttgcaataaattattagtggagatgagcgactgttgatggagatgagtacctttatcatgcagaatatcagcagccagatattggacttttctcactgccccttaatttacttttttaaatattgtcgttctatggcaatcaggcttttggatattgaggaggaagtaataactacataatgtgataatgatgtctttgaggacccttgtccataacaagccatttgaatcagaataatatcttgtgcaatatggtgttaaggcttttaggttacatctcatttctgaatgtattctggatgacttctattgactttatgatgtttacctttcatatttaaaataagagggttcttttagcagattttggttataaaacatctgaaatagtgtaatttaaataaacaaggtaaaggaaaaaaatatatgtattatgccaagaaaatgagctagtccttatggttgagacgaaattttagctttgagcatttttgtatgtaagcacagaatgaagtaggttggattttatagggttcatctcagtaggaattattgttctatttcatttttgcagaattgagaagccatcataattgttttatatttaaacttttaaacagaaacctaaatttgcataaaaactcaagacagcgtttacagtttcaaggcattttgtttgccttattgtatttgtgtacttcttccatagtgcctggcaaacagtaagtgccaagtacatttagtttgattttattttttattgtatcttatttcttcttttttgaggtagggtcttcctctgttgcccaggctggagtacagtggtgtgatcatagctcactgcagacttgacctcctggttggggagtggtggtgtgcaccagtggtcccagctactcaggaggctgaagcagaaggacccccccagcccgggaggcgctccagaacaccccagcttgggtgacagagtgagaatctttctcaaaaaataaataagtaaataaagttgcttgggacatgttatatagatgctatttaaagctatctggataggtaatatcctccagtttataatcatctgtaccccattgcgtgatggggtgatcattttgtgatccaccccaccccaactcatgcatgctaacagttatgtatgccttttctccaatttatctgcctgcgttttgtcagacgattttcagcgaaccttcactgggcaaaggggaagtcttcttttggcccctgtattactaacaagcattgacttctaaatgggtaatttggtcaggtgtggtggctcacgctgtaatccagcactttgggaagtcagggtgggaggatcacttgagcccaggagtttgaaaccagcctgggcaatatagtgagatcctgtctctaccaaaaattaaaaaaattaggcgagcatggtggcacccacttatagtcttacctactggggactgggtaatatcctcaagggaatgagtgtagatagaatagggaaccaagaactaagatctaggatatgttagcgttaagataatggagaaaaggaatcatcagaggatactgagaaggaacaatctgtgtggtaggacacaaacctggagaatatatcttgggaactgaagggaagaaagtaaaacatggaggaggggatgaacagccatgtcagattttgccaataagttaggtaggataaagactagaattgaaaattgtgtttagtaatgtaaaggcctttgttacatggtcttcagtaataaatagccaggttagcactatttatatatgtttttaatgggaatttttgatgtttacagtgtctcctttgccatgttcaggttttccaacctattggtggtatgtctgacagtggatcacaacttggttcaatgggtagcctcaccatgaaatcacagcttcagatcactggtaagttttagaaacatcggctgctttactttatttttccccgtatgattaaaaaataatcctgagagggccaggcatggtggcccatgcctgtaatcccagcactttgggaggctgaggtgggcgggtcacttgaggccaggagtttgagaccagccaagccaacatggagaatacaaaattagttgggcatggtggtgcacacctgctgtcccagctactccggaggctgaggcgtgagaatcacttgactttgggaggtagaggttgcagtgagctgagtttgcgccactgcaccccagcctgggtgatagggtgagactgtctcaaaaaaaaaaaaaaaaaaaaaaacttaagagaacaaaatatttaatggctgttacatgtcaggtgctcaattaatatttgctgaatgaatgaatgaagatatatagatatgtaatttttattgtagaatattcttggatattttacagtttttttttccttcaacatgggtacctgggtagttgctaattatgtttgtttggtattgtattaacagctttattgagatataattcatatcccctacaggttacccatttatttatttacttataacaatgacacaatcatgcagcctcctgctgtggtgactacagtcgtgcaccaccatgcccagcaaattctgcagttttttgtagagatggggtctcactataatgcccaggctggtttcgaacacctgggcttaaatgatcctcccactagggcctgacaaaaggcagataaataggagaaaaggcgtacatcttattagcatgcatgggtaggggtgggatggatcacagaatgattaccccatcatgcaatggggtacaaaatggttatatactcttcttcataggggaaagggagatggggaagtgtggatgattttagagggatggtaaatgatttttaggggaattcagagggctcgaagaatgtacaatggcctgggacaaagtctgtttggcccacagaatagatagtggtttatgacaaaagtctctccaggtccaggtctgttaaaagacttcagtcagccaggcacggtggctcacacctgtaatcctagcactttgggaggtcgaggtgggcagatcacctgagattaggagtttgagaccagcctggccaacatggtgaaaccccgtctctattaaaaataaaaaaaattagctgtgcgtggcggtgcacacctgtaatcccagctacttgggaggctgaggcaggagaatcacttgaacctaggaggcggaggttgcagtgagccgagatcatgccattgcactccagcctgggcgacagagcgagactccatctcaaaaaaaaaaaaaaaagacttcagtttttatattcctgctatacaagtttagttattgaaaactcagggatgggaacaaaggtaattgtaattgttttcttctttggtggatctggacttaggcagataagagaacttcagaaaacaacttcatgctgtactttgagagaaagaagattgagggaggggagctgcaggggtcagagagaccttgagagacttacttagttcagcaagtcaaagcaccatattttgggatatcagtttctgaaccccaaaagtacattcacagagttcagcaaccatcaccacaatcaactttaaaataatttcgtccttccaaaaagaagccctgtactcattagcagtcactctccatttaacccatccatccacaaacccaggcaactcctgatctttctgtctctagatttgcctattctggatctcgcatataaatggaattgtacagtgtgtggccttttgtgtcttctttgggcagactgttttcaaagttcatccatgttgtagcatgtatcattacttaattcctttttttgctaaataatattttattgtatgagtatacgaaattttaaaaatccattcttcagttgagggatgtttgggttgtttccactttttggattttatgaaaaatgctataaacatttgtgtacaagtttttgtgagaatgtatgttttcagttttcttgggtatatacctaagagtgaaattcctaggttatatggaatccatgtttattagcattttgaggaattccaaattattattattattatttttttttttttttggagacagagttttgctttgttgcctaggttggagtgcagtggtgtgatctcggctcactgcaacctccgcctcccgggttcaagtgattctcatgcctcagtcttctgagtagctgggactaccggcacgcacaaccatgtgtagctaatttttgtatttttagtaaagacggggtttcaccatgttggccaggctggtctcgaactcctgacctcaggtgatccacctgcctcggcctaccaatgtgctgggattacaggcgtgagccactgcacgggcccaaattatttttaaaagcagctgcaccgttttgcattcccactagcaatatatgaggattccgatttctctacattcttgccagtgattatcttttttatgatagccattctagtgggtgtgaagtagtattttactctgtgtgtgtgcgcgcgtgcatatgttttatccatttaatttttttttttttgagaccaggtgacagtctgctctgtcacccaggctggagtgtagtggtgcagtcatggctgactgcaatctctaacttctaggctgaagtgatcgtgccacctcagccttctgagtagctgggactacaggcatgcaccaccctacccagctccctattgtggttttggcttgtactcctttgatggctaatgatattgtcttttcatgtgcttattggtcatttttgtatcttttttggagaaatgtctgttcacgtcctttgtttgctattgtaaattaatacctctgtcgctattgttaattaatatctctgtctttatttcttcctctaatcatttcatgtatcactttcagattaatgtttttaatatgccatccaatatgtttcattcctgctcaaaaaccttaggtacttctcttagactatggtatagagtttctttagtatgagctaagacccttcaccctctgtctacatatggtgtctttgtaggttttttgtttttttttgtttgtttttttgagacagagtctctgtcgcccaggctggagtgcagtggtgcaatcttggctcactgcaacctccgcctcccaggttcaagcagttctctgcctcagcctcccaagtagctggggttataggcgcccgccaccaagcctggctaatttttgcatttttaatagagacgaggtttcaccatcttgaccaggctggccttgaactcctgacctcaggatccacccacctcggcctcccaaagtacagggattacaggcgtgagccaccgcgtccggcctgtaagtctttatatgtgaaccatttgtactagctagaatgagtcactggattttcctcagatgtgtatgtatttctatcacacaatgaaaacctcagtctctctccctttaatttgatagcatttattgattatagaacaattatcatcccctgtattttagtttcaactatgcctggcttatagcttcttctggattatgaataggttaggtcacagatcatatcttagcattattattttcctcaaaacctaaaggtgattgaatataaaaataatactgtcttaaggtaaccacatcatagaattttttcggatttccttcactaactctggtatctttccttagcagtatctgtttcttaaagaaagatattactatttcttagttaaggccagattccagttttttttccccacccctcatcctcaatctagcttgagtagctgacttatatcagaccagaattcttatgacttctttttggcagcttaaagttgaaagcttttattagaacagtcctttaaaacattctgtactttttcagattacataagtaatatacattttattttttactgatttaaaaaaatagtaaattattctcagagacaatgattaatagtttttttctttgcataaagtgtcttacttgctatcatcgttattgaattttttttttttttttactgtgatgataaacactaattgcacctcaaaaagtcgtaatccatagccatctcagatttttttctttttgagatggggtctcaccctgtcgtccaggctggtgtgcagcagcgtgatcatggctcactgcaaccttgatctcctggggtcaggtgagcctcccacctcagcctcctgagtagctggaactacaagtgtgcgccaccacacccggctaatttttgtattttttatagagatggcgttttgctctgttgcccaggctggtctcaaactcctgggctcaggtgatccacccacctcagcctcctaaattgcttgtattagaggtgtgagccacctcactcagccacatctcagatttttaaaatcttgggtctaaaatattctttttctttttttttttgagacagtttccctttcgttgcccaggctggagtgcaatggcgtgatctcggctcaccgcaacctccgcttcccagattcaagcaattctcctgcctcagcctcccagatagctgggattacaggcacccgccactatgcctggctaatttttgtatttttagtaaaaacgggttttcaccatgttggtcaggctggtcttgaactcctgacctcaggtgatccacccgcctctgcctcccaaagtgctgggattacagcgtgagccaccgcgcctggccttaaatattctcttttttataaatttttttctttttctttttttaattcattgcttgctaattgggtctaaatattctgagaatgctcaagtgtagggcaaaaaacaaacacaccatgaataatggataatagttcagcaaacattattagatatgaaacagagaacataagataaaagacagaagtgccaagtttaatagaatcaaatgcccttcataattcattgagttacttctttagttttgatgctagaatgcttagaactaagtattttgcacaaatctccttaatgacatcgtgggttttaatctcttaatgggtcagttatagtatttgttttattgtaagctgcctcaatgcctttctagaatcaagtaaggaataaatatgcaagtgtaaaaaatgaatgtcaggctgggcgtggtggctctcacctgtaatcccagcactttgggaggccgaggtgggcggatcacttgaggttgggagttcgagaccagcctgagcaacatggagaaactctgtctctagtaaaaatacaaaattagccgggcatggtggcacatgcctgtaattccagctactcggggggctgaggcaggagaattgcttgaacccgggaggcggagatggcggtgagctgagatcgtgccattacactccaatctgggcaacaacagtgaaactgtctcaaaaaaataaataaataaaataaaaataaacaaatgtcaccatgtattgtaatggcaagaagggataactggtcaggaaaaagagatcagtatttgactagagtcactgggaaagaaggtggtgtttggattgctgctatttatttatttattttaagggacagggttggccgggcatggtggctcatgcctgtaatcccagcactttgggaggctgaggcgggcagatcatccgaggtcaggagttcaggatagcctggccaacatggtgaaaccctgtttctactaaaaaatacaaaaattagccaggtgtggtcatacgtgcctgtaatcccagctactcgggaggctgaggcaggagaatcacttgaacctgggagacagaggttgcagtaagccaagatcgcacccctacactccagtggcacagtcacggttcactgcagccttaacctcctgggctgaagcaatcctctctcctcatcctctatagtggctgggactacaggcgtgtaccacccaccacacttgactaattaaaaaaaattgtgtttttgttttttttttaagacggagtctcgctctgttgccaggctggagtgtggtggcgtgatcttggctcactgcaacctctgactccctggttcaagcaatttttctgcgtcagcctcctgagtagctgggattacagacatgcgccaccaagcccagctgatttttgtatttttagtagagatggaattttatcatgttggccaagatggtcttgatctcctgaccttgtgatctgcccacctcagcctcccaaagtgctggaattataggcgtgagccactgcgcccggccaaaaatttttttttgtagaaacaaggtcttgctatgttgcccaggatggtcttgaactcctggcctcaagtgatgctcccagcctttccataagtgttggaattataggcctgagccactttccctgacctaggattgctgctgtttaaatgcagaaaagtagaaaaggaccctttgaggagacagcatgagcaagacacatgaaagaagagagtacacaaaacttgccctaatacccatgaaagctcctataataggggagccctgagaatgggaatggctgtgtctttcaggtgtgccttaaaaaaaatttattgctaagggagatggagatgggaagtaatcagtgtttgtatcaaagggtggttagatttgtgttttagaaagttagaaagagaaaaaaatttttctttttttttttttttttttgagacagtttcgttctgtcgcccaggctggagtgcagtggcgcgatctcagttgactgcaatctctgcctaccatgcccacccccttacctacttatttatttatttattgaaacagagtctcgctctgtcacccaggctggagtgcagtgacttgatcttggctcactgcaacctccgcctcccaggttcaagcaattctcatgcctcagcctccccagtagctggtattgcaggcatgcaccactgtgcctggctcactttttgtatttttagtagagatgaggctttaccatgttgtccaggctggtctcaaaatcctgacctcaagtgattcacccacctcggcctcccaaagttctcgaattacaggcgtgagccattgttcccagccaatttttaaattttttataaagacacattctcattgtgttgcccaggctggtcttggatgttttgaatcagctcttcgtttcttcttatcatttagccagggtctttaccttggatgtaagtctgttttcttatgtccttccctgtctttatttacctgtttcccatttaattatgcctatatataacctcagctattatactgaactcatctgtgtcttctttttttcttttttttgaccgggaaatttttttttaaattacaagctcaacccatttgttctgtttcaaaggtgcagtacttttcttcatttattagtgaaagaagttaagaaattaactttccaaaaaaatcagcaaatggcaagcaaatgtccttgaaagtcacagtcacatatagtgtctcctagaaaagaggaggggtaagacagcttccacctactttcacaagtttcatcaaatactggatctactcaagggtggagtaaaaaggcaactaactttctaaaaggagtatgttattaaatgaggcatttactatactccttcctaaaagccccagatggggaacatgttttctcaactagacctaggaagtagactgtggaatcaatcggtcctcctcaccttaagggccatccactggttaatgaattaaaaaaaaaaaaaagactgaaaaacaaacctcccccctaaaaaagaggagggggaaaaaaaaccactaagatgtcccagagtggaatcagggagcagcttcaacaattccaattagtctgttacagagtcatccacaagcatgccttgctttaaaaatacatatatatatcttgaaataacaaaactgaaactagtactaatcacttttctgacaatatacaattactcaaaattaactagtactgggctagggatacgggggggcggcgcatagctatgggccttgtctcacatgagtacatgtgggtaggtgcagtgcgtttgtcattatggcaaaaacgaattttaatttttaagctttagtttgacttaaacattgcttttagtatgatgccaacaccagctatgcagaaagggctctggagagatgttcctagcagcacacatatgcagctcttcttcggttctggaggttccagggcagccaatattgcttcgtcaaatacattctttaggcctttctttgtgagtgcagaacactccacgtacttgacagtcttcaggtcatgggccagcttattcagcagtctctggagtgataggcttctgtttgttcttggcaagtttctcaatagtagaggggtcatctttgagatcaatttgggtcccaacaagcaacaaaggagtctttggacagtggcacccacttttctttcacattttcaaatgaaaatggagagatggagagaccactgaaaaatagactagaaatacatctgtttgtggataactcagcagtcataatccctcataatcctcttgctctgcagtatcaaaaagtccaagagtatatggttctctaccagtcataattgttattgcatagttgtcaaaaacagttggtacatattctgatggaaatttgttgtgttgttttaccaacagcaccatcacccacaacaacacacttaattgtctgcattgctgaaatagttttgtatccactttaaatatttcaaatctcatgttgacctcagcttctccaccgggttgttggctcatctgtgttttttatttgatgtttgttgtatgctagcattgggcaaaataaggaaactttggtatttgccagaaatttcttatattctcgtctttactccaaattaagaaagagatgtcatcttgattttagttattattaatcgtaattaaatattactgcatttcccaaatttattacagtgcaatatatttagctctgattgttcagggaccaaaaagatcccttatacttatgttttttttttattcctttaacagtccagcaaactaagaattttatacttgtgatttagagtttagttctccacaggcagggcagagttcttccaaagaggtagctgttgctcaactggattgatctcttacctggttcattattctgcttatttatttagttttggcactgttttttgttgtaccttgttctctgtagcttatccaaagtaggttggataagctacggatccattctttttttgtatgtgtattgtaaaatgtttatgttgtatcagagagatacactgaagaactgaaatcagttcaaagcactgaccttcagaacagaaggatcagaggaacattagtttaagccatgaaaactatttgcattagtatgtgggtatgtgtgagagagagagagcacatgcatgggagagtgagatagccagcaagtgattataataaagcagagagacagagactagaaagcagggaaacttttgttttctaccatgactaataacaatttggttcaacatgtatattaaatacctctcagattaaatcccagagtgctccagaaattgtaaagattggctatatctgtgcaatcaagaggctcacggggtgagttaaatgagtaaaaactagtaagacaaaatgaaaagctgacggagccatacgtaaatatggaaatactctggaagcatggaggtggaaataatttaacttcttaggattaaagaagcctttaatcaaagagaagggggatgtttatctctcaggaaatataattttaatgggtataaaagaaaaaaggatcattctcagtagagggagcagcatgtttagaggaatgaaagtacatggcccatgtgaggaacagcaaataactaagggtggctagaatatagaactttggtaagatttgttttagtaggaggctggaagggtaagttatagctgcatactaagcaaggtaaaatgccccataagagtttaaacttcatttttcaggcaataaagaatcatttaagtaatgacattaatgacatgatcacatctattctaggaaaataattctggtggctgtgaggggttggattggagaagtgagagtaaaaacagttgtttagaggcctctcatagtagcccaggtgtcagatgagactgacatttttctggtcctttttcttccggtttataatgtatagttttttatttttttgtttaatttactgtgggactttagttttcagaaagtagtacattgatttattttatatttgtaatattatgactataacacaaggttttgttcaatctagactttgagatttgaatactgaaataatttctcctgtccaggttttgcagtgtgacccttgggcaaatttttaaatttcacagagcttctgtctttttttttttttttttttttgagatggagtttcacccttgtcacccaggctggagtgcaatggcatgatctcagctcactacaacctctgcctcccgggttgcagtgattctcctgcctcagcctcctgagtagctgggattacaggcgcctgccaccatgtctggctaatttttgtatttttagtagagacagggtttcaccatgtttgtcaagctggctcctgacccccgttgatccttttgactgagacttccaaagtgctgggattacaggtgtgagccaccacgttcggccgcttctctttttatgtgtaaaaattaggacagtaatacctgtttcgcagaataggtattgatattgaaatgacatttacgtgcaggcacatggtaaatactaaaattggtgctcctccacccccatgtaaagtttgttaggccaggcctggtggctcatgcctgtaattccaccactttggtaggcctaggtaagtggatctcttgagcccaggagtacaagaccaacttgggcaacatgtcaaaagcttgtctctaccagaaaaaaaatacaaaaatttcctggatgtggtggcacgcacctgtagtcccagccacttgggaggctgagatgggaggatggcttgagcccaggaggtagaggtggttgcagtgacctgagattgtgccactattctccagcctgggtgacagaaccagaccctgtctcaaaaaaaaaaaaaaaaaaaaaaaggtttcagtggggtttggtaggattatgtagcaaaattgctttcacaaatttgaatccagctgggcacagtggctcacgcctgtaattccaacactttgaggggccgaggcaagtggatcacctgaggtcaggagtttgacaccagcctgaccaacatggtgaaaccccgtttctactaaaaatacaaacattagctgggtgtggcggcgcgtgcctataaccccagctgcttgggaggctgaggcaggagaatcgcttgaacccggcaggcggaggttgcaatgagctaagattgtgccattgcactctagcctgggcaacaagagcgaaactcctatctcaaaaaaaaaaaaaagtttgaatcctagaaagccccaacaggggcagatcatttccttcctgtcagccttgcgttgctctttgttctaggtttaatcagtttcagagtgccacaagaggccctgaaatataatgagtgtatgtataattgtttgggctatttcaccttttcttagaccagaaatgtattaaaagtagaaattttatgtttttctgtgtaatcctgtgattaaatttggctctatattaagcactagagctttgatttaatagtactttttttttattttttattttttaatagagatgaggtctcactgtgttgtccaggctggtcttaaactcctgggctcaagtgatcctcccgcctgggtctcccaaagtgctggtattacgtgcccggcctattacattttaatcagagatagctctggtccccacttgaatattttttattctgaaaaagactttctatttcatgtttccacttagatgtctcagcatctggcatctgaaacaatttttttttttttttaaaagacagttttgctctgttgcccaggctggattgcagtggtgcaatcacagctcactgcagccttgacctcccaggcttaagcgatcctcctgcctcagcctccccccagcagctgggactacaggtgcacgccatcatgcctggctaatttttaaaattatcttttgtagagacgggggtctcactatgttgaccaggctttgttcaaactcctgggcctcaagtgatcttcctgcctcagcctcccaaagtgctgggattacaagtgtgaaccaccatgcttgatcttgtctatttgtctagccttctcttgcaactcttctttttcttcagtcagtcattctgtggctagcttgaatgccagcaaaaaggcacataagcctaaaaggatggaagtatttgatatatgtaaagtcagagtttcagggccaccacctgggactatgcctgcttagatatccagactttggactatatattaagctgctgcttcttttttttttttttttcgagatggagtcttgctctgtcacccaggctggagtgcagtggcgcaatcgcggctcactgcaatctccgcctcccaggttcacaccattctcctgcctcagcctcccgagtagctgggactacaggcgctcgccaccacgcccggctaattttttgtatttttagtagagacagggtttcaccatgttagccaggatggtctcgatctcctgacctcgtgatccgcccgtctcagtctcccaaagtgctgggattacaggcgtgagccaccgcacccggctatattaagcttcttaagtagttactatataaactcctctgacaactccaagggttccttaactttgatgagcattagcattctctgaactttgctgctacagtagataacctgggtggtggagtagataacctgggtggtgggtacttccttggttgtagttacctcatctatgagggagcaatgacttgccacctatggaaatcatggggtgctttgctagatttctacttgttataccctgtaaggggcctggacaaagctattttatggcaaaggtaactaaaaggtgaaggctaaggagtttgtatctcaagatgcacaacataggaagctcttccttagataatatgagatgttaaaaaaaaaatcttagtttgtagttcttattcttccattggctttccaacacacagaataaaatctaaattatcattattattattatttttgatacgtaggctcactctgtcgcccaggctggagtgcagtggcataatctcggctcactgcaacctccacctcccgggttcaagcaattctcctgcctcagcctcctgagtagctgggattacaggcgcctgccaccacacctggctaagttttgaaattttttagtagagacgaggtttcgccatgttggccaggctggtcttaaactcatgacctcaggtgatccacccgcctcagtctcccaaagtgctgggattacagatgtgagccgctgcgcccagctgcagattctttatcttggtttataaagctcccatacaaagcttatctcccttcatttaccattccttcctgtgcttgctatactttccctcagatatgccatactcatttgcctctctctggaatgctgtcttattcccacctccagtcttcccatggctggctccttgtcatttggatggttgcttaaaagtcttctcaaaggccttccttactaccaagtcattttctgtcacatcagcctgtttttcatcataaatactttaattagaatataatctccttgaaagccagatccttttctttactgttaattgctttagggacagagtttagagcagtatctgacacatggtaggcattcagatgtttgttgaccatgtttgtcaatgcatacattttgttttgagatatggtctcgctgtgctgcccaggcaggtcttaaacacctaggctcaagcagtcctcctgcctcagccacctgagtagctgagattacgggtgcaagccaccctgcccagccatatgtgtactttttaaatttttcctcctgttgcccaagctgttgcacaaccatagctcactgaagccttgacctcctggactcaagcgattctcctacctcagcctcccaggtagctgggactggcacacgccactgtgcccagctaatttttttgatttttaggcgagatgaggtctcgctatgttttccagattggtcttcgactactgagcttaggcaatcctcttgcctcagcctcccaaagttctgggattagaggtgtaacccgctgcacctggcccatatgtgtactttttaattgatctgagttctggacttttgataccatggaattctactgatgggaatttgggttgatggtacggggaacctctatatttatttactaggatgggaggaagtacaaaggttatgagtgaataaaattggtaagtattttagagcaaaactgcttctctgagtaaatttagtaaatctgcctaattatgaagttaaattgatttcatgagtgaattaacatctcaactattgaaatgtttttcatttcttttacatagtcatctcagcaaaacttaaggaaaataagaagaattggtttggaccaagtccttacgtagaggtcacagtagatggacagtcaaagaagacagaaaaatgcaacaacacaaacagtcccaagtggaagcaaccccttacagtgtaagcttggaagtatttttctgtagtatgttttgtttagtagatgattggaaatacaatttaaaaaaatgtttctcactttggttttttgttgttgttgttcctcctttctctcttctttttttttttttctttttcctaggactccttctggtttgcttttttgtttctctttagatagctgtttttatagtcactccctttctttaccttctctagtttagttggtgatgatattgctcttgtcactgaacaatagctgaagagagcccatggtcacggacctaaaaagatttctggcagcactttttattaactttgggttgaattaagggattatgagtactccccccccccccggtttttaacttaatttttaaaaatagtgttttagttagttttttctttgttttattttgagatagagcctcaccctgtcacccaagctggagtatagtggcactatcatagctcacagcagccttgaactcctggcctcaagagatcctcctgcctcagcctcccaagtagctgggaccacaggcatgcatcactgtgcctggccagttttttagtattttaaattacggtgccagttatactatagttatttattttttgaatgagatggggtcttgctatgttgtccagagtgctctctctcaaccttcccggctcaagcagtcttcccatctcagcctttttctcaagtagctaggactactactatacattttattctacaactttctttttgtacttaacactaatatcatggtgatctctttacctgagtacatatggatcttgcatcccttatatagctttgtaatattccttaatatgggtggactatattttaatagttctgtattgattctaatgttgcgctattaggcagtattgcagatacatccatgtgcatatatctttgtatgttggtgtttatatctgtagtgtagattcatagaagtaggatatagctcagttttaacacaaagccctaaatgttggcattataatctaagatattgacagccattgaaggttaattttaatttttaaaattaaaatagaagaaaacacatggagccaggtgtggtggctcacacctgtaatctcaactctttgggagactgagccaggaggattgtgtgaggccaggagttcaaaggtgcagtttgatatgattgctcctgtgaattgctactgaactctagcctgggcaatgtagcgagaccctgtctctacaaaaagacaaacaaaaaaaaaaaagaagaaaaagaatgatttggccaggcatggtggctcactcctgtaatcccagcagtttgggaggccaaggtaggaggatcacctgaggtcaggagttcgagaccagcctgaccaacgtggtgaaaccccatctctactaaaaatacaaaaattagctgggtgtggtggtgggtgcctgtaatcccagctactcgggaggctgagacaggagaattggttgaacctggtaggcggaggttgcaggttgcagtgaactgagatcgtgccattgcgttccagccagggtgacaagtgaaactctgtctcaaaaaagagagaaaaaaaaaaaagaatttatggaagatcatcttgaggcccgtatcattcggatgttcctcatctgtgtttatttcaacataaatgtttcttaggctttctgtttttaattaatggctcattgtagattgagtcaaaatgaaacaatgtattaaaaaaatttcaagaaaacacatgaggctgggaatgactgcacatgtttgcaatcccagctacttgggaggataaggggggaggataaggtgctttagcccaggaggagttcgagattaaccagggcaaagtagcgagttcccatctcatatatattttttcctttaccaagtggtatctataaaaggtcgcagcctccatgattaccagagatgttcagttgaattagatggtcacctaatttcctccaactgctttgagtgcgtacttgatatgcacttggaggctcttaagctgttaatgtcatgaacttcttagtgatttaaaagttaagaaaaaaactctctttgtagttctatgtggtagtgctgttcttgattacaaacatttgggaaacttacaattcaagttattttcctgaatttttaagttgcagcaaattggcctggaattttatcacttcccattgtcgtgtagcaggctttccagactgcttttgagaattgaattgaaacaagactgatcatctttgacagtatactttatgtacctttcttccatattaaaaatagtaaagttaaatttatttgccttttatttcatccctattatgatttctaaattgactaatagagaatttcttttttccactctcacccaggctggagtgcagtggcgcgatctctgctcactgcaacctccacctcccgggttcaagcaagtctcatgcctcagcctcctgagtagctgggattacaggcatgcaccaccactctcaactaatttttttgtaattttagtagagacggggtttcaccatgttggccaggctggtctcaagctcctgacctcaaataatcctcccacctcggcctcccaaagtgctgggattacaggcgtgagccattgcgcctggccgagaaatattttcctaatacaatatataatatgagctctcttgaaagtagcatctgagaattttgaaaagaatgaatacattgtatcccctaagaagaggagcagtgtggaatttttagtttgttttatctacccattgccgttgaaatggtgctggttaataggtacaggtagacttcaaaggaggaaagtgtttctttgtcccctcaaacttgatcacattagagagaatgagatatagagaaattcaaacatttctggaatttgtctttatatcattgaaccataggactgtggtagattatatagtgctcctagctttctgatccttgactctaacattgattctacgtgtattgcaaattcaaatttcccagtttactttggaaataccattatagagagtattccttattggcatttagcaaggaatgagtgagtctatatttgatagttggactgggcaacttgcctctagcagtgtgaaacttgatgtatgtaatgtaatcttcaaatcatgtagctgacgtgaggaactttttaatataaagtttaatgtcaggattttattcacattacagttctgctacttactggctatttgaccttaggcaatttgctttatctctgaatgtcagtttctgtatctgaagaaggaagtgataattcccatctcatagggttactataaagataaaataacttcaagctctgtaaactactgacataaggatttaatttgtaaagttactcttctgtactactaaagtaaaactagttttccaatagtttgttgcaggataagcagttttacttttgttgacaatatgtgtatgaatttacttctgtagttcaactgcaagtgaaaatgaccatgtaagcatgtagcattcagataattttcataagattactgaacataggccaatattgattgtatagtaaactgtaaggggtgcagtgagaagactttagactttaaaactgaattgtaatttatttaggatctcattgtgatattcaataaaaataatattttttccctcttttttcacttttagtatcgttacccctgtgagtaaattacattttcgtgtgtggagtcaccagacactgaaatctgatgttttgttgggaactgctgcattagatatttatgaaacattaaagtcaaacaatatgaaacgtatgtatgtaagactaatagaaattgcacttagctgtttgtttttctggaagaaatttatatgtcaaacatgcataatgactcatgttctctcatacttttaagttttacttggttataggatgaacagatagaagaattttacactattgaaagtattctgagtaaccttggtttgaccattcattttggattcagtatttttagtaaatatttatttacttagtaaatagatattagtaaagtaatacatatttaattgtggaaaaactaaaatatagagcagagatgaaagaaaaaaataaaaatcccacttcagagacaaatcaaatgaatatttttacagatttccttttcagatgcttttttttttgggagggacatggggagacaaggactcactctgttttccaggctggagtacagtggctatttacaggtgcagttgcagcacagtgtagttttgaactcctggcctcaagtgattatcctgcctcagcctcctgatatatctgggactataggcaggtaccaccacatccagctttaaatgcttatttttaaaaatgtcctcattttatgaggttgtggttttatttgtatatgtatatttatataatgtagaaatatgtgtagcttgttttaattaatatatcattttaaaacacatttttttctacccctcgactatctaaaacatacttctaaaaattttctcatttaggacttattagatataatttatccttaaattatgtttttactcaatttaattcaggtatatattactaaataatccttattcttatgctagcccattttatactatagtcttacaaggatggaatgaacataataaacgatggagatactattttacatcatgaatatgaaacattagcatattttgtcctttttaaaagatacagtgttttggtgtcaaaagtgttcaaaccttgggtgaaacatagttaaacagtttatatgcacatatagttatattttctcggacatcacatttttaacagttaatttttaacagttaagatgccttaactgggaaaaaagtgaccattttttctgtaactttattttcttccagttgaagaagtagttgtgactttgcagcttggaggtgacaaagagccaacagagacaataggagacttgtcaatttgtcttgatgggctacagttagagtctgaagttgttaccaatggtgaaactacatgttcagaaagtaagtgactacctttttaaggtctttaatgattcttcttaaataaaatagccattgtagtatgctgtatgtaattattttgattttttttttcagattaataaaatgtttttttctggccggtgtggtggctcacgcctctaatcccagcactttgggaggctgaggcagaaagattgcttgagcttggaggttgaggctgctctgagccgtaatcacatcactgcggtccagcctaggtgacagagtgagaccttgtttctttaaaaaaaaaaaaaaagaaatgatttttttctttttaaaaaatagacattgatcactttaaacattttctttttagtgtattatttctgtgaataaaagcatgtatatttttacataagttgaaaaattagccaaatagaagttgaatcacatttgcctccatgagtaatgagttgatttatatagtatttattctgtaggccaactatggcagttaatatgggttagatgccacaccgccaactgtgccaatggcagacagagtttattgtctgtagcagtgtggggctgagtttaaatatgactttaaatccttttttttttttttttttttttttttaagacggagttttgctcttgttatccaggctggagtgcaatggcacgatttcggctcaccgcaacctctgcctcctgggttcaagcgattttcctgtctcagtctcctaagtagctgggattacaggcatgcgccaccacgcccagctaattttgtggggtttttttgtttgttttagtagagatggggtttttccatgttggtcaggctagtctcgaactcttgacctcaggtgatccgcccacctcagccttccaaagtgctgggattacaggcgtgagccactgcatccggcctctaaatccttcttaacactgtaccacccagccattacaagctgagatccatttaccattccccttctacttctgtaggctacacttacagagatatcttttgacaatactaattcattatatgtgtgttagtaaatcttacaatctctgatttactagtgtgtgttaaaggaaaataaactgtggtggcacctgagttagtggctacacagctagcatatttaatagaactttttcctactgttttcccatcagatatttccatcacttcctaatgtgttaagtgtattttcacttgaaacatagattttagaggcctgaagacaatgaaagagcagattaatggatttcttgatgagtttgacgaagatcttttggtttacttaggaactgcattatgaaacattttgcagctgtcaggtgctattctttttctactttgttgaaagacttcctacttcctctttgactcatgacttttaaaaatagcaggacaggctgggcacagtggctcacaccccttgatcccagcactttgggaggctgaggcaggagggttacttgagcccaggagttcgagaccagcctaggcaacataacaaaaccccatctttgcaaaaaataaaaaaatttgccatgtgtgtggcacgtgcctgtagtccaggtacttgggaggctgaggtgggaggatcacttgagcccaggagtcagaggttgcagtgagcgaagatcacaccactgcacttccagcctgggtgacagagtgagactctctctcaaaaaaaataaagtagcaggacctaatatgtcttccagattagttctctggggctagtgaggatggaaagaaatttctgaaatggttatactgatttggagttgacactttgattattgttcacaagaactctataatagtcacatttttctatacataaattggaagtctggaagataaaatacaagttacattgttaaactgccctaaacctcagtatttatagtgtcctaagcttcgcccatagaagatgaaactattactaatgtaaaatatttaataattgctggacgcggtggctcacgcctgtaatcccagcactttgggaggccgaggtgggctgatcacgaggtcaggagtttgagaccagcctggccaacatggtgaaaccccgtctctactaaaaatataaaaattagcctggcctggtggcgagcacccgtaagcccagctgctcgagaggctgaggcaggagaatctcttgaaaccagaaggtggaggttgcagtgagccaagatagtgccactgcactctatcctgggtgacagagcgagactctggccaggcgtggtggctcacgcctgtaatcccagcactctgggaggccgaggcaggcggatcacctaaggttgggagtttgagaccagcctgaccaacatggagaaacctcgtctctactaaaaatacaaaattagctgggcgtggtggcgcatgcctgtaatcccagctactcgggaggctgaggcaggagaatcacttgaacccgggagttagaggttgtggtaagctgagatcatgccattgcactccagcctgggcaacaagagcgaaactgggtctcaaaagaaagaaaagaaaacagttataacaatatactacaataaaagttttatgaatgtcatctctcagtttcactttcactccaaaaatacctcatttttttagctttgtttggacctttggggggaaaaataccttattgtactcacctacttttggaccacagttgactgtgggtaattaaaaccatagctaaggggaggcctactgtacttacagacacatttttggttctttctttttggtggataaattttctaaaaatggcagttatataaataaactttttccaagtgaaacaaagtgtacttgttttttctttttctttaagttgtattttaaaactagctggctttatattcccctactttcaactagtttaatatctcgctacaagtctcggttataatgttttctttacataatttgttatggtgttttccttcaatgaagtacagagttaatctgctttcatgagtctctaggaagaggtcttcctagacctcttcctagctttttttttttttttgagacggagtcttgctcttgtcacccaggctggagtgcagtggcactatctcagctcactgcaacctctgcctcctgggttcaagcgattctcctgcctcagcctccagagtagctaggattacaggcatctgccaccacacctggctaattttaatttgctatttaggtagacttttttttttttttagatggggtttcgctctgtttgcccaggctggagtgcaatagtgcgatctcggctcactgcaacctctgcctcccgggtttaagtgattctcctatctcagcctcccgagtagctgggtttacaggtatgcaccaccacgcctggctaattttgtattttttagtagagacagggtttctccgtgttggccaggctggctttgaactcccgacctcaggtgatccgcctgcctcgacctcccaaagttgctgggattacaggcgtgagccactgcgcccggctgacttttttttttttttttgagacggagtatcgctcttgttgcccaggctggagtgcaatggcacgatctcggctcactacaacctctgcctcccgggttcaagcagttctccttcctcagcctcccgagtagctgggatgacaggcatgcgccaccatgcttggctaagttttgtatttttagtacagatggggttttaccaagttggccagggtggtgtcgaactccggacctcagttgatccgcctgcctaggcctcccaaagtgctgggattataggcatgagccactgcgcctggcccagctttttttttttttttttttttttaaaggttgacttattcttatagcccacagatctgaagtaacaaatcaggtgtgggcagttcatatctgccagaggttctcattcatctttttttttcttttcgtgggatggtttttttggtgagttgtttagtaccagtcttcccatttatgacctctaacaagaaacacagaaaagtattattgccaaagactaatactagttttcctaaagagaaagaaaaatgcattttactttcaactttttttttttttttttgagacagggtatcgttcatttgccaagggtggagtgcaatggtgtcatcttggctcactgcaacctccgcctcctgggctcaagtgatccttccacctcagcctccccagtagctaggactacaggcgcactcagccacacccagctaatttttgtattttttgtagacaggttctcactctgttgcccagggtggtctcaaactcctgagctcaggcaatcctcctgcttcggcctgccaaagtgctgggtttataggcacgaaccaccactcccggccacttttaacttcctgattataaaataggaacatagtcttgtagagatctttactttttatcatgtatactctggatgtgtttaaaattaatttagggagagtttttggaatatgtgacttctggttcttattctatgcattccattccttttaaattttgatgctttgttatgttaggctctagtttttgtagttccgcttaacgttagggtaaaccattttcatatgtgaatatattgataatgtttcttactagaataataaattctaagaaagtagcctaaattttttgctttaccaaatattatttgaagttactagatctcaactggtctgggtaccaactaattttatagagataaactttgctgtaatgttagttttaaaaatttgacttacatttgaacatacgtctatgtatgctcagaatattaaataatttacttccccacaaaaggtagtaaaactcctttctttctttttctttttttcctttttttttttttttttttgtgagacggggtttcgctcttattgcccagactggagtgcaatggcgcgatctcggcttaccgcaacctccatctcctgggttcaagcaattctcctgcctcagcctcccaagtagctgggattacaggcaagcgccaccacgcccgactaattttgtatttttagtacaggtgaagtttctccatgttggtcaggctggtctcaaattcccagcctcaggtggtccatgtgccttggcctcccaaaaagtgctgggattacaggcatgagccaccgcgcccagctgtaaaactcctttcaacatgtatgttatgtttttgtcttactttatgagaggtactgtaaaaattgaagtattgaggctatgatatggtcattgtgaatttcagtgaagactactgtgttcttcatttttacaatttacaaagcccgttgttatatattctcatatttaatatgtgtaagatataaaataaaatgagcatccctgaaactatcacacagcttaagaattagagtattaacaatatcattgcatccacctgtatttttcttcctatattattcctttcctttcctttcgagataatcactattctgaactttgaatttgtcatttctgtggtctttaaaagttttatcctatgtgtgatatataagcattacttgtacgtttctcttgagctctatgaaaatatcagtgttgccttttttttttttttgagacggagtcttccactgttgccccggcttgagtgcagtggcacgatcttggctcactgcaacctccttccgggttcaggcaattctcctgcctcagcctcccgagtagttgggattacaggcgtccacgaccacactcagctaattttcagtgttgcctttttctttttttgagacggagtctcactctgtcgcccaggctggagggcagtggtactatctccgctcgctgcaagctccgccttgccggttcacgccattctcctgccttagcctcccgagtagctgggactacaggccttttaagatttagtcatataattgtgtccgtaggccattcacttttactgctgcatagtaatctgttgagtgaatgtaccgggttttaagatttttatatcaaaggacatttgcttagctttttttttttaaaccatgtgaacagtgatacattgaacatttttgcatatgtttattaataaacagatttaacgtttatgttgggtgtatgcttgagagtagaattgctggggtatgtttattttcagctttacaatattaattgcttcttcaaatatgctattaggatatttaaaactgagatgaaatttacataacatacaattaacggttatataaagtgtacaccttaatggtgtttagtgtattcacagtgatacacatccaccatctgtctctagtttcagatctttcttgtcaccttagaaaaaaaaccccatttctttcttctcccaagccgtgataactgctaatctgctctctgtctctatggatttgcctattcaggatatatcacataaaaggaatcatgtgactttttttgtttggattctttacttagcataatgaatttgaggttcatccaagttgtagaatgtgtcagtacttcctttcttcttatggctgtatgatagttctactgtgtatatttgtgccacaatttgtttatccattcattcattgatagacatttggcttatttccatttggctgttatgaattataaataatgctgctttaagcatttgtgtacaaggttctgtgtagaaatatgttttcatttcttttggatatatacctaggagtagaattgctgatgcttgtttttgatagtttctcatttcttccttgtaattttttttgatacataggaattttttttaaaacattctccatttgataattccagtgtctgaaatccttgggtatataaatggttttttgtctcttcctcattgaggtttgttttcatttgcgtttgttcttcgattgcaagtttatatttgatcttaatctgttggaatcttaagggcctaaattggggattctttgccccagagaacatttcttttgcttctgctagttgctagggtgtaccactgaactgggaacgcttcaactcctttcctacctgtgtatttgtaaaatggatcagacccttgccagcctaatgtggcaggctctggttcagcaccacaggtttgctgctggcccaaggctttctaatccatctgaggattgaaaatggccctctggataacccagtttttcacatttgctcactgcatacttgtgtctgttcactttgtttttttatttttgagacaggatctcgctgtgttgccagactagagctcagtggctattcacaggaacggtcatagcacactgcacctttgaactcctggcctcaagcagtcctcctgcctcagctttttgagtagctgggacttcaggtgctcaccaccatacctggcttcagttcacttttttgtttttgagattgctagacacccaagaaataggaacgatgtgttaaaacgctttatctaggagctagttattttgtggtgggagggcaggtcattttgacgagcttactgagtagaagagatctttgtagatcttccaaagtttcttgtgggtaaaacatgtgcatttagcaatctgacaaattttcttgaggaaatttggattgggaatacctttaaagggcaatacgtttgtaaaatgcagtggttaagaacaaccattgttctcttcttggacgttcattgtataagtgttagatttttgttgttgttgttgttgttgttgttaactattctctggttgtaagcagaggataagatctaaataatttatgccatacatttcatagttatggcttcactttatattggagtgaaataaaagagtgaatattccaggcatggtggctcacacctgtaatcccagcactctgggaagccaaggcgggaggatcacttgagtccgggagtttgagaccagcatggacaacatggtgagactccatgtattcaaaaaaatctttaaaaaatgtagctgattttgtggtggcatgcatccatgcatcctcccactttgggaggctgaggtgggaggattgcttgagcctgagaagttgaggctgcagtgagctatgaccatgccactgtactccagcctggacaatgcatcaagaccctttgtcaagaaaaaatatgtatattgaaaaatggcccttgtttagactttcctaatgagatgtaaattttgagaaataatagttattatttatggactgcttatatgtgctagcactgtgctaaatgtttacatgtttaattcttataaatactctatgaagtaggtgtcatccccattttatatatgcaggaaaagtacaggaagtcaagtgtacttttgtaaggtcacaaagtacatgataaagctaggatacaaacctaggcagtctgccctcagaactcatgtgattaaaatactgttctttgtcactgtagtgagaaggttttagaagtagcaaataatggtagacttaaatggattattcctaatgattttcttaattttgagaaaagtgaaatactaatagacacattttagtaacttatgctggatattttgttgtggttttctgatttcatttatgtcccattcataagccattttaggggactatattccatattaaaacattcttaaactgaaatttaccctttatagccaaaatgtatttcattgtaccattttttttttaccacattaacatctttattgagttgtattttatacaacataaaatttacccatttcaagtgtacagcttaatgaattttagtaacttaagtgagggattcaactatcactgtaatttaggtttaaaacatttttatcccctcagtaaaatccctcttgcctgtttacaggagcttcccttctcactgtcagccacaggcaaccaccactaatctgtatttttttttttttgagacggagtttcactctgtcgcccagggtggagtgcagtggtgtgatctctgctcactgcaacctctgcctcccaggttcaagtgattctcttgcctcagactcctgagtggttgggactacaggcgcccgccaccacactcagctaatttttgtatttttagtagagatgaagtttcgccatgttggccaggctggtctcaagttcctgacctcaggcaatctgcccaccttggcctcccaaagtgctgggattacaggtgtgagccaccacgcccggcctctattttttatctctaaaaattcgtctttttctggacatttgtataaatggaatcataaaatatctgttttttgtgtctggcttctttcacttagcataatgtttttgaggttcatccatgatatagcgtgtttcattagtttgttctcttttattaccaaatagtaataattccattgtatagacaacattttattcacatactatttaaagataatatatttctagactggatgagacatttaccaactttgctaagtatggtatagtatagtggtgactcagtattttttaaattaatccaccaattatgcttttttgtaatatggtaataatttccctgtttaaactatgattctatccagggcctattgttcctttactaaatggacctaggtggtcgaacttgagttcttgtttctacatgtgatcatttttctttctctttccctgtttaccatttgttttgcttctttaaatgtacctacctttagcaccctccctccaacacttttcttttttttgagacgggagttttgctcttgttgcccagactggagtgcaatggcgcgatcttggctcactgaaatttctgcctcccgggttctagcgattctcctgcctcagcctcccaagtagctgggattgcaggtgcctgccaccactcttggctaatttttgtatttttagtagagacaggttttaccatgtaggccaggctggtcttgaactcctgacctgaggtgattcgcccaccttggcctcccaaaatgctgggattacaggtgtaagctgttgcacctggctcctccaacactgttacagtaaaaagatctggactgaatcctaaggatattttccatcaataaagcaagaagaaaataagaatattgtggcattaatttttggcaacttggattcccatttgtggctttcctaatttttaagctgttttccaggcccctgcaataagagagacgttatgggtttttctgtttctggaatcgattttattctgctggcgatcagcacttttttatgaggtatttgggatacaaagatggttaaaacactaggtttaaattagagttagacatatttcaaaaaaaaggcaggaatagtagtgcatgagtaatatacctttagtaattaacatcccgtatccattaattattaagcatttgcacaaaattttggcagactttttttgcagtcatgaaaatcacatttttccttttaaagtcatgttggaatttaagttatagtatgttctttattacaaagatttaataaaaggctttgcttacatggcatgtttagaaaagaaaaaacatgaaaactactctcttgaaactcattttctgtttaaactttgatgttaaaggtgcttctcagaatgatgatggctccagatccaaggatgaaacaaggtaagcattcactgattgcttaccacagaatgcggagagatagatttcctaaatattcattttagtgtaaacttcaggttcatgatataagaataaatgagtgtcagaaagaattcagaactcaagaagggaaatatttgcaaaagattgaagactcttagcttatcggattagagctatctggagtgggctagggataaccaaattgttgatacttcttcagcttgtagaaaataaatatactggcaccttttcagaggcagggtgttctaaactccagagccatcattgggctgttaagtttcttttccagaaaaactgagataggagctttacacatatgtgaaggtcaccactagctatggtatcatctgggccttcattagaaggggcagagctttgtaccagctgtttgctgttagcccaggtttagcactttcatgtgcctatctgcgttcaagtttggacctaaatgtggggaaaagaaagaaagatcagtttgttactgtgtctatgtagaaaaggaagacgtaagaaactccattttgatctgtactaagaaaaattgttctgctttgagatgctgttaatctgtaactttagccccaaccctgtgctcacagaaacatgtgctgtattgattcaaggtttaatggatttaggtctgtgcagaatgtgccttgttaacaatatgtttgcaggcagtatgcctggtaaaagtcatcgccattctccattctcgattaaccacggacacaatgcactgcagaaagccgcagggacctctgcccaagaaagcctgggtattgtccaaggtttccccccactgagacagcctgagatatggcctcgtgggaaaggaaaaaccttacatcctccagcccaacacctgtgaagggtctgtgctgaggaggagtagtgaaagagggaggcctctttgcagttgagataagaggaaggtttctatctcctgctcgtccctgggaatggaatgtcggggtgtaaagccaaccattcgttctattctgagataggagaaaaccgccccgtggctggaggtgagatatgctggcagcaatactgctctgttactctttgctacagtgagatgtttgtgtaaagtgaaacataaatctagcctctgtgcacatccagacatagtacctttccttgaacgtattcatgatacagattcctttgctcacatttttccctgctgaccttctccccaccatcaccctgttgccctgccacactcccctcgccaagatagtaaaaatagtgatcaataaatactaagggaaatcagagaccagcgctggtgtgggtcctcacacgttgagcgccggtctcctgggcccactgttctttctctgtactttgtgtctgtgtcttatttcttttctcagtctctcgtctccacctgacgagaaatacccacaggtatggaggggcaggcccccttcatctaaaaggtgttgaaagccttggactatgtgaattaacttagactgcttattggttatcctggaaatcggtaacagcagataaaattaggaaaggagatgattctgcttttaaagtagtgagtggcatgtcttaaccacagagtgcagtgattataaaattccatttgattctttgtttttctcaaattgcataagcagtgagtaggaagaagatgatgaaccacaggaggagtagtcagaaggggagaagaacgagaaaagtaatgtcacagactgtgagggaaaattatccacaaagatgggatgttacagtgtcagatgctgcagaggaggataggtgaagaaagtagaacaaaatactgatggttgttgaagctgtgctgttaggtacatgggagtttattgtattagtctatctgcatttgtcatctatgggttgttttttttttgttttgtttttttgtttttttagatggagattcactctttcacccaggctgaagtgcagtggcgcgatctcagctcactgcaacctccatctcccgggttcaagcgattctcttgccttagcctcttgtgtagctgggactactcaagacaggcatacaccaccatgcccggctgtttgtatttttagtaagagatggggttttgccatattggccaggctggtcttgaactcctgatctcaagtgatctgcctgccttagcctcccaaagtgctgggattataggcataagctgccatgcctggccgatagatatatggaagttttttggtttttttttttgttttttgaggtgttgtctcactctgtcacccaggctggagtgcagtgacacaattttggctctctacaacctccacctcacaggttcaagcaattctcctggctcagcctcccgagtagctgggattacaggcacccgccacgatgcccagctaattttttgtatttttagtagagacggggtttcaccatgttggccactatggtctcattcttctgacttcgtgatctgcctgcctcagccttccaaagtgctgggattacaggcatgagccactgcacctggccaatatatgaaggttttcataataaaaagttaaagacaactcatcaagatctttaggaaaatcaaagtttataaagctgttgtgtcttacctaataggtatctgctttcacattcttatgatgaagaatcatctatactaatctcacgagatgtagaatattaaggagcagtaacttcttgcctagaaaatagcagatacttttattctttactgtgattaaaatcaatggggccggtcatggtagctcacacctgtaatcccagcattttgggaggccaagacaggaggatcacttgagcctaggagtttgagaccagcctgggcaattgagtgagacctcatctctacagaaaacaaaacaaaacagaaaaattaaaattaaaaaacggtagttaggcctggtggcacgtgcctgtagtcccagctgttggagtggggagggtgcccaaagtgggaggatcacttgagctggggagatcagtgagctgagatcgtgccactgtactcagagtgatgacagttagaccctgtgtcaaaaaaaaagaaaagcaataggacaggtttaaaaaattacataaatatctgtagactgaatactattatgtctcttttgtctttttttagtattattatatttagtagaagatttcttgaattcctgaaagttcccgcataaaatgttttagtatttcagtttgctttggtcatttacctcttcttttacacaataaacctgtatctttgtataataagtgggtatgtaaaaggttctgttatgccagtgtgttgttgcttgtttgttttctgcaagtctctttcttaacagtattttcatcaaaccacttgtactctggacatctttaaatttattataaaggcattgctggatcccctacttaatgctatttaatcaatgctttttatcttcctaagtgaatcattgtcataaataatttggggaacaatgtcttctgggtttctgagactgcctgacaaatctttgagtatgtcttttgtgttaagcataagttcctgtgcatcagcttttattccagagcacacacacctttgagatgacaggtttgaaaagcattttgtaaactgtcaaaagctgtttaaatgttactacacaataatgagtagtagtcatagctgtgactgccttttctcctttgcttttgtttgcagatttcatgactataaaactaaaaggcagggaagtatatatgtagtggacaggtgcttcgcatccttccctccatcctcatagttatcgtttaggaagtttactaatagccttaggttattttagcttttgatcttaattcaagcactgtctgtatcataaatgtgtttattgatctgttttccccacagcatgtctggatgttttatgtttctcagtgttgtcttctgtttatttgtttatttttatgaagtaccaagattattggtgcctgattttcaagattttgtcgttagatgtgcgttctttttttttgtttttaagtttattattatattttaaagacaggctctcgctctgttgcccaggctggtctcaaacttttcacctgaagcatttgccctatctcggcctcccgaagtgttgggattacagacatgagccaccacgcccagcacatgtgccttcttgattgttactctttgatttgaacatttatgacctgattgtactataatagcattttggttgtctgaggttctctatcctgtccataacttatgaacttatttataggtcagatgtatatgtatgttgaaattagcagatgtttgtaagattgtggaataggggaacaaagttatagtagcacataattagcagctaattgcttttctttttttacttttttgtttgagaccgtgtctcgttctgttgcccaggctggagtgcagtggcgtgatctcagctcactgcaacctccacctcccggattcaagtgattctcctgcttcagcctttcaagtagctgggattataggcatgcaccaccacgcccagctaattttttgtatttttagtagagatgaggtttcaccatgttggccaggttggtctcgaacttctgacctcaagtgatctgcccacctcggacctcccaaagtgctgggattataggtgtgagccaccatgcccagccagctaattgcttttcaaagccaattggtggtgttggttccactgacaattctgtatactgtatagatttccggattgattttcaaaatctatttttagttttagcctcacactttactaaaataacttaaacttattaaaataaataaaataaaccgccagtactattttagtatggccctgcttctcaaactttagagcacattagaatcacctggttcattagatttggggtgggactcaagatttgcatttctaacacatttccatgtgatgctgatgctgctagaccagggtctacattttgagaacacaatggttagacacacacgtttttgcaaattataactattctgggaaataataacagatagtaaaaacagacttcttatataatttttcattatataagaagtctgtttccccaaagtccgagcgtgcagaatttgctagaactgtcaatctgtcttaatttcatacccttttgagagctgctttgaatcttgttttttttgaactgttgtttttatgtttattattagaaaataatacgattgttttaaaagatgtaaattaaatagtgtgtaaagtaaaatgtataaagccttaatagaagaaataatatttgacctaagaccttaaaacagagctataaactgtatatgcatgtcttagaggaattggagggaagaaggaattctaaatggaaagaagaaaaacaaaggtggtgagaaacacaggttgttttgtaggaaatctttaatcataatatttggctaaaggtgcagtaatttcaagggagaaatggcatttggtgattagaaagtagaatcagtcaatatatatttatttgcctttatatgatagacactatgctcaacatgtctattcttccttcagttagtccttaaacgtttatgagttaggtactattgtctcatttttataggtgatgagaaaacaagcttagaaagggaaaggaacttgcttgagttaatagcgttaagtgggacagttgaacctggaacagccttaccttcagagcctgagctcgtaactatcatgctttactgccacctgaagttgggatgatatacaagtaagtgcttagccattaataaatgttatttttattgttagataggttgggaccagatggaggtttgcaagtaaagacttacggaattttttttttttaaaggaaaggaatgtcttttaaaataatttgattttgttctgttttgttttgttttaagactgagttttgctctgtcgcccagatgggaatgcagtgacgcgatctcggctcactgcaacctctgcctcctgggttcaagcagttttcctgcctcagcctccgagtagctgggattacatgcgtgcaccactagacttggctaattttttgtatttttagtagagatggggtttcaccatgttggccaggcttgtgtcgaactcctgacctcaggtgatcttcttggccttcttggcctcccaaagtgctgggattacaggcgtgagtcaccacgcccagcctaaaatatttgaacaggagattgtatgatcagaactctgtaggaaaaaatattttgacagtggtatatagtttggattatgtggtggtgagtgaaggttgaaagtcctatatggaaatttgttacaataatctattgagaggtaacgaaggctagaactgaggcaatgatggtggaagagtagagggagaatgtgaaagtgggatcaacaggacttagatactgagtgtcaagaggcacagggaggaaaaatgtaaaattgcctgggaaagacagcagtatcgttcatagaaccaaaacctaagaaggaaggaagaccataggaagagaatgtttagagggacgggaggacctggcagggcatggtggctaacacctataatcccagtgctttttgggaggcccaaggggaagattgcctcagcccaggagtttgagaccagcctgagggacaaagcgagaccccatctctacataaaataaaaaattagccaggtgaggtagcatgctcctgtagtcccagctactcaggaggctaaggcgggaggatcccttgagcccaggagttcaaagttgcagtgaactgtgattgcgccattgcactccagcttgagtgacagagcaagactcttgtctttaaaaaaaggaagaaagggagggccttgggatgggagagttattctagatctcctgcatttagttgataatttgatactagaggatgggagtgagataaagagtagagattgatttgggaatcattctctgagataaccttagaaatcatggaatttgagatcctagggaaaaatctgtggagaaagaaaaggagaacaagaacacaatcatagagacctatatttagtggatggtaggaagaggacaaaccaaaaaagggatgatgagaagtgggagtacaagattacaaaagcactgtcacagaaattaagagaaaaatgttctttaaaagatgggacatttggccggtggcggtggctcactcctgtaatcccagcactttgggaggccaaggtgggcggatcacttgaggttaggagttcaagaccagcctggccaacatggtgaaaccccatctctactaaaaatacagaaaaaagttagctgggtgtggtggcatgcgcctgtaattccagctactcaggaggctgaggcaggagaattgcttgaacccgggaggtggagattgcagtgagctgagatcatgccactgcactccagcctgggcgacagagcaagattagattctatgtcaaaaaaaaaaaaaaaaaaaagatgggacatttaacactatcaaacgctgcaaaagagaattaagtcttagattaataagctagggaaaactggctgtttggaaaaagaaaagaaaaatcaggttaacgccttagcttatcccaagatgagagtagattcgatgttgacttttaaattgattttaaaaaattaaactaaaacctctagaagaaaatatgaatagttaattcattgctgaataaatttagctatatagaaatataaaactcttataatttaaaaatgtattatcaaaagcaaaggaaatatttaaccaatatgagatgctcagtattctcaggttgtaaagatctcttaaaaataggcaaaattattcccttgtaatagataaatgtacaaaaaacatatatatagttcatgaaagaagaaactgtaatgacctgtaattatatgaaatattgttcatctttaattttaaaaagcattaacatttttgcttaccaaattggcaaagattttaaaactttatggtgaaatgggtgtttttattttgcggtacataatttgaaaatgtccagcaaatgggagaacaggtcaattattacctttaaaactattttttagggccaggcacagtggctcatgcctgtaatcccagtacctttgggaggccaaggcaggtggattgcttgaatccaggagttcgagaccagcctgggtgacatggcgaaaccctgtctctactaaaaatacaaaaaataagtccagaatggtagcctgcacctgtagtcccaactacacaaaaggctgagtcaggagaatctgtggaacctgggagatggaggttgcagtgagctgaaatcatgccactgcgttccaggctgggtgacagagcgagaatctgtctcagaaaccaaaaacaaacaaacaaaaaaacactattaaaaagaaacaatttaggccgggcgcagtggctcatgcctgtaatcccagcactttaggaggctgaggcaggtggatcacctgaagtcaggagtttgagaccagcctggccaacatggtgaaaccccgtctctactgaaaatacaaaaattggccgggcatggtggcaggtgcctgtattcccagctacttgggaggctgaggctggagaatcgcttgaacccgggaggcggaggttgcagtgagccgagatcgtgccattgcactccaccctgggggacaagagcgagacttcgtctcaaaaaaacaaacaaacaagcaaccagtatttttcagctttcaaaatatttgcatgttttgacttggttgttctattctgcagtctgtctaaaagaaataagaaatccaggcagggcatggtggctcacgcctgtaatcacactttgggaggccgaggtgggtggatcacttgagcccaggaatttgagaccaccctggtcaccatggataaaccctgtgtctacaaaaaatacaaaaattagccaggtgtggttgggtgtgcctgtggaataggaggatcacgtgagcctggggaggtcagggctgcagcgagcagtgattgtgcctatgcactccagcctgggcaacagagtgaaacaatgtctcaaaaaaaaaaaaaaaacccaaaaagaccaatgaaaagaaagcgattaaattgtagtatgtctatatataattttctgcagtcattcaaaatgattttcagtaatttgggggaaatgcccaatatgtattgagtaactaaccaaataaaaacccacccagaatatgaaaccattatacagtgtgtgattgcagtcacatccaatgagaaggactgacaagagatagtcctatgtcttggtggtaattatctccaggatgtaggatggcagataatttttattttataattagaagttacttttgttctttgaaagtctgttttaaaaattaaaatgggggctaggcgcagtggctcatgcctataatcacagcactttgggaggctgaagtgggcagatagcctgaaccctggagtttgaaactagcatgggcaacatggcaggaccttgtctctacaaaaacatacaaaaattagctgggtatggtggtgcatgcctgtattcccagctactcaggagactgaggcgggaggatcatatgagcctgggaggtgaggcgggaggatcatgtgagtctgggaggctgaggctgtggtaaaccatggttgtgccacggcactccagcctgggtgacagaggaaaaccctaagggaaaaataaaataaaatgcactaactatattaactgcattttaaaaaagagtatagtgaaggaaaggggaatgggaagacagcttgaggaacagataggattgaggaaacattttaggtttgggtgcttgattatatttgtagagtaagacaaaaggtctataagaaaggaatataatgaagatgcaagaaagcattaaaagatgttgggcagtcctagaggatatagtctgccatccaggacatgataggcaaatcatccttgaagaaggggagagagactttttcagacatgggaaacagatggagatggttagtggcacagagaaattttaaggtatgggagaaagttgagggatagcagataatcattatttttagggaagaggaagagtcagggatagctacagattggtattagcaatttgaggagatggaaaaggtttgcaaggggcactggggatgggtccaggagtggattagagatgtagaaactgattgatttctaaacaatatagataacccaattaaagttgttgaataatgtcagctgtagccaatgttggcttggtctctttgacataatccagttttaggtatttgaatactctataaatacaaatacatagactgaagcacaattttaatttttttctatcttttgcctaggtctgtatgattgtataggacttagagctttttgtcctaccaaattattaatttctttattcccattaattttaataccagcacactaatctcattaaacccatggttttactactaggttgtcaaagtcatccgtcatttataattccctagctcccaggagtcttgagctgtgattttttggtttgtttgtttttgggttttttttttttgagacagagtcttgctctgttgcccaggctggagtgcagtagcacaatctccgcttaccacaacctcagcctcttgggttcaagcgatcctcccagctcagcctcccgagtagctgggactataggcgcatgccaccatacccagctaatttttgtatttttagtagagatggggtttcgccatataagccaggctagtctcaaactcctgacctcaagtgatctgtccaccttggcctccttaagtgctgggattacaggcgtgagccactgcagccggccgatttcttctttttaataagaggggagaaaagagtttttgtctttaataattggtagtgaaaacctctgaccttttctttactgggcccagtggaaaatttattagaattgtttgtagagcagcctgccctttaatatgctactttacttagtttatttactccactaaaatacacctgacttctcaactggaacattctccagcattacttgttggtctgagagaatagtagtgtaaaaagtagatgaggggttagttgtggtggaagaatttctgggaggggaagcagttgggcaagggtgaaggaattgaaactactagggaaagtagcctatgatgaagcccaagtgaggcgtgaagtgagctgatgaactgtaaagattctggaaggagttgaaggttgtgatgagactgaataaaagatactgtaggaggcaggtagaataaataggaagttgtagttagagggattttagagttcaagatctaggaagaggaacaattctaagtatcaaggaaatttaaggagttgtacgggttatcagatgactccattgaaaaattgagatcaaaatgttataagggtgtacagcattgatgttaaaattccccaaattttaatccccagcaacaaatcatagcatttttggaatcctgtttctgctgtacctttatcatagtaggtttatctcatgcactgaatgttccttctccctcacatatccctaaaacttgtctagcactgaatgtgcaatttagtatgaattttctagctgaaagatttttaggcatcttgtagtcaagataatacattttaggatgcattcttgggtcacataactcatcagtagcagagtcagagctagaaaccttaatttcccaatttttggtctattctactcattgttatctgttatttaaaaagcagcaggaactcttctttcaaactagttaggaacgtcttaaaatagcatggagaggcaatacgcagtcttaaaatggttttggaaacctcacttagaagaagagaagcagtgtcaaagctgactcttcctgcattcagaccatgttctgcaggtagtcaacactaatcaggtgctgactgccaattactgaggtgttccctctattataagcatttggggaacccccaaagtagtgcttgtcataccttactgtccacatatataatctggggatcttgttaaaatgctagctctgatatagtaggtctagaatagttttgaagattgtgcatttctgacaagctcctgtatagtgctcgtccgtttggtttaaagaccacactttgaatagaaaggccctaaaggatttctgtggtacacagtttgaaaatgtcttttaaaatatgaggactggtacgcagtggctcgtgcctgtaattgtagcactttgggaggccaaggagggaggattgcttgaggtcaggagttcaagaccagcctgggcaacatggcgaaaccctgtctctacgaaatacacaaaagaattagctgcgcgtggtggcaggtgcctgtagtcctacctactcgggaggctgaggcatgagaactgctagaacctggtaggtgaaggttgcagtgagccgagatcacaccactgcactccagcctgggcgatggaatgagacgctgtctcaaaaaaaaaaggaaaaagaaaaaaactatgtgaggagagagagatgttaattagcttgactgtagtactttttttcactatgtatatcaaaacatcatgttatactgtttttattaaaaataaatcattgcaatacatgttttacagaaaaaaaatttaatacatggtactgcctctctgtttctttgtttgtttgagacagggtctcactctgtctcccaggttggagtgcagtggcgcaagctcagctcactgcaacctccacttcccagactcaaacaatcctcccacctcagcctcctgagtagcttcgactacaggcgtgccctgccatgcccagctactttttaaatttttttgtacagacagggccttgtcatgttgcccaggctgatctgtcactcctgcgcttaagtgatcctttcacctcagcttcccaaagtgctgcaattacaagcgtgagccacagcacccggcctctgttagttgaatctattagattttattttgttcaggcttattctgaaattcctaggagtatgggttagtactgtgtagtggtttggaggtagtacataccagagccttggctgagacatctgcagactggctacttatgcccttgtttctaatctatgactagagcccctctggaaggaaaaggaatcagctatatttagccaacagtagcagtagctttcagtctgacatttcctgttagtgttcttccctcctttctatccctccagttgatgtcattgctttgaagaaatgacagctcctttaaaaaaagtctgtggttacttctactctaaatcactagctttgaacattttgtgtaccattgtactgagctgggggatatcagggcctagtccctgggaaatacgtgcactttgttctcctagcatgggaaaaccagacctgcctcaaacttgaattaatagccagtggaaatcaagaaacaacaatggtaaagttatctgtgcttgtgataaaatagtgccctaaggattttgagaacttgactttgttcctgttcatatagggccttctgaaggcttatttgaaatatgaaccagcatacctaatagttctgaatggccacaagtgttcctatgcccttggacaacccatcactctatctctagatgaactctgggggttatataggattctacccaaaggctctttatgtatttaataaggctgaccagaaattaaaaagcttttttgaagctcttaaaaacttagaagttttcatcctcctgctgttttttttcttaaattcaaggagtattcattatttccctctcccccttccttttcccctcttcttacccagagtgagcacaaatggatcagatgaccctgaagatgcaggagctggtgaaaataggagagtcagtgggaataattctccatcactctcaaatggtggttttaaaccttctagacctccaagaccttcacgaccaccaccacccaccccacgtagaccaggtttgtattccagctctcaatactcttggaaataatgtcctggttggcaattaatcctcaggtaagtgtcaggaaattcttttaggtgaattttctgcgtgtatttttacatttaagattttggaaaagaatgatctttctgtaggtaaccaaaagtgcctttttcctaagtttttgttcaaggtgacgttactgaggcagtgctctactgagaatgaaaatgacatgtgcgtaatataaagtataggcggtgcagataacatggcaataacattgtacctttcttaaatggtttgtaactataacataaatgtattaaatactcaaggatttggttgcttattcctagtatatcctttaaaaagttagtaaacgaaaacccaacaatgctaaatgacccagattttaaataaaaagtacacaacaaacaagcatattttaggtagtaaaaatgtgaacacctataagactatccacttctctgatagccagaacaaatctttaatcttaccttttattgtttctctctgctaatatgtgggcagggaatgcagtgtagttaaaccaaatattactagaaaagtacattagttctctgcaaataattttaagtgaatttctattcaattatacatcttctcctttttatttttttattttttgagacagggtctcactctgtcacccagactggaatgtggtgacatctcagctcactgccacctctacttcccaggctcaagtgattgtctagcctcagcctcccgagtagctggtaccacagtcatgagccaccaatgcctggctaaatatttatattttttgtagagatggagttttgccatgttgcgcaggctggtctggagctcctgagctgaaagtgatccttctgcctcggcctcccaaagtgtgggagttacgggcgtaagccactgcagccacatcttccccttttatagataatttgattaattgtatattctgagtctttaagatgtctttattataatcttggtgacttcctctagacattgttttgtccacaagtatttcttaaaggtgtaatgtatgactactaactatctgtaagaatgttatttcttatcagaccttccatattataaccaacatcaaaaattggtctgtaatctgcacggtttcacaggaaagcagttttaaggagctggaaaattaataaatgaacttaaaataccaaggaatattaataatttcctattctaaaagtttttatttccagtgacatcagaagatcagagaacctgtacatgcttcgtgattagtaatgggacataggggtagacaggaccgaaaaagtaaacaagcctattaactggcagcgttggttatttcccattacttatttctttaagtaattttcacctgtgcatctacatcttaagttttatatttatcatctgccttttattttttacagttaaaattctatcctgaattttagaaaatgaaagattcttttcctattttccccaaatcttttatagcatctgtcaatggttcaccatctgccacttctgaaagtgatgggtctagtacaggctctctgccgccgacaaatacaaatacaaatacatctgaaggagcaacatctggattaataattcctcttactatatctggaggctcaggccctaggccattaaatcctgtaactcaagctcccttgccacctgggtgagtaactttttaaattaacatatgttgtctttaggattcttcataagcctacttattaataaggaaaataacagtaaacaacagtaaactccattgttttgatgactgttttttaatttcttttttttttgagatggagtgctctgtctcccagactggagtgcagtggtgtgatcttggctcactgcgacctccgccccctgggttcaagtaattctcctgccttagcctccctagtagctaggattacaggtgtgcactaccaagcccggctaatttttgtatttttagtaggggatttcaccatgttggccaggctggtctcgaactcctgacctcaagtgatccgaccacctcaacctctgaaagtgctgggattacaggcatgagcacccagccaactgtttttatgttattgtaactgattttgggggatctggagtcaaaatgaacaaggaaaacacaccatatttgaaatcttcagggcaaagtggaaaaatatattttttcatcaaaggaccctgaaagttaaccaaggccaattaataaaataatcacctaattccaattgcctttttctttaagggggaaaaaatccctttttaatatcaaactatttttttcatcagaagatcattataggctgggcatggtggctcacgcctgtaataccagcattttgggaggccgaggcgggctgatcacctgaggtcaggagttcgagaccagcctggccaacatgctgaaaccccatctctactaaaaatacaaaaaattagctgggtgtggtggcaggcgcctgtaatcccagctactcgggaggctgaggcaggagaattgcttgaacctgggaggcagaggttgcattgagccaagatcttgccactgcactccagcctgggcaacaagagcaaaactccatcttggggaaaaaagaaaaatcatagcaaagtgatagataattcagaaaactgagaaaatttgtgctcataatcccattttaatctctcctgattattttaagattattttcatagattgtttttaagatactcaggtgtaattttttcttgtttattttttgtttgtttgtttgagatgaaatcttgctctgttgcccaagctgtagtgcagtggtgggatcttagctctctgtaacctccgtcttccgggttcaagtgattctcttgccttagcatcctgagtagctgggattacaggtacctgccaccatgcccagctaattttttttttttgagatggagtctcactctattgtccaggctggagtgcaatgatgcaatcttggcttactgcaaccactgcctcccaggttaaagtgattctcctgcctcagcctcctgagtagttgggactacaggtgcccaccatcatgcccagctaatttttgaattttcagtagaaacggggtttcaccatgttggccaggctggtcttgaactcctgacctcaagtaatccacccgtctcagcctcccaaagtgttgggattacaggtgagagccactgcgcctggccatttctttccactcaaatcctgattataccctgattgagagtgacttcggtatcctaggtagacggacctcaagcctcttcaggaatatgttttctcctagagcagatacttgcatagaagaaattgaattcactgtgtgccactgcctgaagattacatttcttcactttattcctaaattgtatttgtatcatctttctaaactgatgtccttatttgccttagttcaataatggtcatttaatggaaatgcaaagacaggattaaaaagccaggtaactcatgcaagtattttaccagccttttaattttgtatttaagttgggagcagagagtggaccagcacgggcgagtttactatgtagatcatgttgagaaaagaacaacatgggatagaccagaacctctacctcctgggtaagtatctaaatttaaaaagaataattttatttagtcagaattgtggattacaactgtataatcttccctacatttctgttttactttttcttgtcagccctttctctgtccactttgttttgtggtaagtacaaattaaaaagaagagagctagacaactgattaattcagagcctgataaacaatttttgttttcacgcatatttctttcttcttttctttattttatagaaacaacatctcgctatgtcgcccaggctggtttttaactcctgagctcaagccatcctcccgcgttggcctcccaaagtgctgggattacaggcgtgagctatcatgcctggccctattttcactcatttctgacctaaagattccttaggtgggctgggcgcagtggctcacgcctgtaatcccagcactttgggagggcgaggtgggaggatcacgagctcaggagattgagaccatcctggctaacgtggtgaaaccccgtttctactaaaaatacaaaaaaaaaaaagccaggcatggtggcgggcacctatagtcccagctacttgggaggctgaggcaggagaatggcatgaacccaggaggcggagcttgcagtgagccgagatctcgccactgcactccagcctgggcgacagagcaagactctgtctcaaaaaaaaaaaaaaaatttccttaacttttcttgtctaagctgtttacctgtttactaatactgtagtttaagtattagtttcttcaagagtaattatttaaatgaataagaattagagcccagtcatatattaaaatgaagttcttattatatttaaaaaactataatagcaaaatcatttcaaattaattggggaagttaaggatatattaatacatggtgttaagcctttaacattaacattaacattacagtccaggcacggtggctcgcgcctgtaatcccagcaccttgggaggctgaggtggggggatcatgaggtcaagagatcgagaccatcctagccaacatgttgaaaccccgtctctactaaaaatacaaaaattagctgggtgttgtggcgcgcctgtagtcccagctactccggaggctgaggcaggagaatgacttgaacctgggaggtggaggtgcagtgagctgagattgtgccactgtactccagcctggcgacagatcaagactccgtcaaaaaaaaaaaatcatataaaataattgaagaaaaaatattttttaatccagaggaaagtcagtaacaaacatggaaaaatacttaaccttgttagtaatctgaaggaaatataccctgaaaaggtactgttttagttattaaattagcagataatatcaagtgttggtgaggaactttacgttgttagttgctgccggggctgggcacagtggctgatgcctgaaatcctagcactttggggggacaaggtaggatgggcgcttgaggccaggagtttgagaccagcctgggcagcatagtgagaccccatcactatagaaagaaaaagaaattagctgggcatggtggcatgtacctgtagtcctagttaatcaggagtctgaagtgggaggatctgttgagcccaggagttcaagattacagtgagctgtgatcatgccactgtactcctgggcaacagagccagcccctgtcatcctccctgcatctgcccaccataattatgtattaatacatacccttcataatcctctctgtgaaatttatcctaaagaaacaattcaaaggaagaaacagtttgctacattaagaatattcattattttattatttatataacatcagaatattggaaaccaccctaaataaccaagcaggtagaaatcgtgaagtcattcgattcatttatgaattatgttcataatcaacacaatcaattctttcaaatgttttatttagaacatttgtatcaatgtttacttacatattttgtacccatttaaaatgataggaagtgggctgggcgtggtggttcacgcctgtaatcccagcactttgggaggccgaggtgggcggatcacctgaggtcgggagttcgagggccgcctgaccaacatggagaaaccctgtctctactaaaaatacaaaattagccaagtgtgatgacgcatgcctgtaatcacagctactcaggaggctgaggcaggagaatcgcttgaacctgagaggcagaggttgcggtgagccaagatcgcgccattgcactccatccagtctgggcaacaagagggaaactctgtctccaaaaaaaaaagataggaagttagttgtgttcttgcgaaaaattgtgtgtgtgtgttttgttttgttttttcgagatggagactcactctgttgcccaggctggagtgtattggcatgatctcggctcactgcagcccccacctcataggttcaagcagttctcctgctcagcgtcccgcgtagctgggactacagatctgcgccaccacacctggctaattttttgtatttttagtagagatggggcttcaccctggtggccaggctggtcttgaactactgacctcaagtgatccgcctgctttggcctcccaaagtgctaggatcacaggtgtgtgagccactgcacctggccaaaaagtgctttttgatatctgtccaaagctatatatttaatttgtgtccctgttatgattgaaacagtaaaaacaacattgaaaagaaactcaaaacttaatgactgtttgagacttactcactaaatatgtattgcattttaagaacctgactaatgcatcttatgaactttcaagaaataaatttttagaaacatttctcttaagttcacttacaaactatttaaaaatacataaaagactccagataaatcaaaagtagtttctcaaggtaaaatattctatctgtttcacaagtatttgttgaattagcttgtttttttttttttttttctgatttagctgggaacggcgggttgacaacatgggacgtatttattatgttgaccatttcacaagaacaacaacgtggcagaggccaacactggaatccgtccggaactatgaacaatggcagctacagcgtagtcagcttcaaggagcaatgcagcagtttaaccagagattcatttatggggtgagcagcctgttgtttaataaactaataagagtattttgtttctagccccttccagcatatgtcatggaaagcactaaaaagaaggtgcaagtagcatggcaacccagttgttgctgttagtaggtattatttttagaccttgtctggggtattctgtgtgtgatctagtttttcctttttgtaatttgcttaagtccaacttcctcttctttttaatgtcaaaaataagcaaaaaataagttaggacaacttaaaattcatgaacaaaagagtagtaaaaataaacccaagcagcttgaaaataattaaaacatttctaaatttactagtgccttgggtctaagagcatctgactctaaagtggttgtgcaaaactgatgataagagtttaaccactttttaccatttggagataaggcttacctaataaattatttggtactctgggagactgaagaaatttgatcctttataggagtatgcttactatattattctggctttaaatctttattatctttgatataaaatcatttcccttctagaaacaaatggtttaaattttacatattttcctgtagagcaatattgcattaatagtgtaagtactccaaaatcttcctttgctatgcagtctttggtgctaggaattttataatctctcaagtcatacagtatcattgatcttttgtctggaggaaaaggaaaataatccattgagaaatttgattctctatgccaaacaagatggatttgttatatagaacctaaacgaagaaaatcaagccttaaggagctcaggagaaaatgccccctccatcaccatctcttcccctccactgccattggtatcatccctgttagaattcatcagagtaaaacagcacctttcgtattcctttcctaactaggcatagttttatcccttttcttcatattcttgtctattccttatacctcatcatcataatagcactcactgctgtagacaaattcacctttatcagcagccttccctttgttccttggttatgactcaggtacttttctttcatataacaattttttcctgccactttctctaaacagttgctaactatatttcccctcccagtggttttaaagctgaaatgaattttgtctcttgtgtactttacccttcttttcatttttttttctatgctgttttacatcttccttcctttctaaattataatcacctgtggtatgcctggccaaatttcttctaggtttgaatacctagcttgcctgccttctttaaaactagtttccacatgggtgttcagtggaaagagcatgggctttggagttagacacatctgggttcgaatcctggttccacagttactttctccatatgactttgagtaagttacttaacctcatcaagacttatttcctttatctgtaaaataaatacagatataaaattgcctcagagtttttctgaggattctttaaaataaagttccaatatatttggcatgtactgaatgcttagaaatgttagttcccatctcttctctccttcatattcacctctgtatatgtaccctttatctcatttttgcattacacaatctttcaaagcattcttttaaaagagagatttagcagatttctggagcaccaacggtgtgttttgactactgtaatcctgaccgatttagtactcagagtctttggaatttttttttttttttttaagtacagcttctccttcatcatcctgtccccccgcccaatccaatataatctgaacaattttctgaaatttttactctttgtacttgatgtggagtggtttgaaattacatagaatctaaacagcctattttagttaacatagccaaagatataagctgaagtgaattaatttaacatccttaataacatttactttaaaaatgatggggtgttgctgagaaatagtctgtttattgagtatatgaagtggcctttgtccaccattgttgttgtgactcttactagcatacagaaactgtcatacacccagcattttaagtctcagagtggatatggttgacagtaaaacactgtgaaatggttcttcctggtccatggcttaattgtgcatgtccctagtttatccgtccagggagagccagtggggttggcttcagtcttaaaattgtcagtacagtatgtcacgtgccaaacttttcagacctcatctgtaacttgggctcagaccttttgtagtgtttcccgctggcctccctgttctcacatcttctcataatcatgtctgtcaggaggagcaaggcagttctcgacagcactaaatccaagagttattatatcagtagtgtaatgtagctcatatcctttaaaacctcatcaatcaaccaggtttctgtagtaggccggtgacatggggttgtaggggtgggtaaagaaacaagaagagatagcaggggagctgctctatattgagatttaagagaaacaaccaaatgtaacgtaaggactttgtttgggtcctgattttaacaaataagcaatcatgcatttaattacagattaggtattggatgataaaattaacattgattctttaccacatgtcataatgacattgtgattatgtaagaaaatgtcagcctggcgcggtggctcacacctgtactcccagcactttgggaggccgaggcgggtggatcacgaacaaggtcaggagtttgaggccagcctgaccaacatggtgaaacccggtctctactaaaaatacaaaaagttagctgggcgtggtggcgcgtgcctgtgatcccagctactcaggaggctgaggcaggagaatcacttgaacctgggagccggaggctacagtgagccgagatcgtgccactgtactccagcctgggcgacagagtgagactccatctcaaaaaaaaaaagaaaagaaaatgtccacaaattttagagagacatactaaaatatgtagtagaggtgaaataatgtttgattttcgcttcaacaaagaacaggagaaaagagataaagaaacttggcaaagtcttgataagtgttgaatcctggtgctgggtatgtgggaatgtgggattcattgccctgttttacttgttttttttttcttccccatagtgaaattatttttaatgcagttagactcttgtttatcttactgaagaagaaagggtttaaccaaatcttactgggtgaccatgtaattatctctacttaattatacatttaaatcaaaacagacttaatatctctacacagagtcggtgtgacttttgttttctttttccaaaggttgactcttactttgctttcatcttatctagccaaatctttctctccaccaatgtgatcattggaaacagaacttttaagaagtcttccatacagttctaggctcattaacactttccagctggaaacctttccttccactcatctggcagcccactcttcctgttcccccaactctcttctcataattctttgtatgtcacatgttctgtatttgatcttctgtttttgagttacacatataatatttttcatagtcatatgatgattctgggtactggtattgtaaatgacttttgggggggttatatatttttctaatttttatattattgatgtaaaatttgtagcacaaaggaaaaatggtcattttggggatgaggattacatatatgtgtagtattttaattttaaataattttaaatgttaggtaatgtttgcaccggttttttttaaaccaaaccaaagtatattggcatttatccataaccatgtgacacttctttaagatacaaactctctgtgttatacattgccagggaagggaaatcagaactcataagcttgctgtcagataagttgttaagttgttaatagtttcatcactttttggttctttttagaatcaagatttatttgctacatcacaaagtaaagaatttgatcctcttggtccattgccacctggatggggtaagtcacatgagtttcttcatggagttctgtcatttcatttttgttctcttccaattgtgtcattttaaaacagatatttatgtctgatactgtgctcttgcttgagtgaatgtctgggaagtttttttttaatatatatatcagtttaattcacaaataggcattaaattccccaaacattaagtggactctttataaacttttattgacgctcataattattttactcttctacagtttaaagatactgatcacccagcaataaaaaaggaatgggctattgatacaccagtaggtctgggtggacttcaagagtaatttgcttgatgaagaaagtcagtctcaaaagatcacaacctgtgtgattcaattcatataacattctcaaaatgacaaaactagagatggagaacatattagtacttgtcaggaaacagggtaggtgggaagtggattcaaatattaaaaggtaacataagggggttttacgtgatgatgatgattccatcatcttgattccatcaagatccacaagatgattctgtatcttgattttggtaataggtgattacattaataatgtatacatgagataatgcatagaactatatatttacagaaatgaattcagcttttaaacatggtgaaaatttaacaatgtttgtggttaacaataatgtaccaatgccacttctgtggttttgatgctgtacgtagttatataagatgtcaccatcggagaaaaatgaagtatatgtgagactttttgtgcaattttttacatcctgtgagtaataattaattcaaaataaaaagctttttaaaaaattgtaatcacattggttctcctaaaacaaggttcagagtttggttaagttggcattatctgatagaagagtggaaggagcacatgtgaaggtgtcaacttcatgccctacaccatggagctcaagagcatgtgctgttattgagtatatctgataccttagttattaaaatagaccttaatagactttaagctggacctaccctactaggttctattttatagtgttatgtaatactcacagcattatatagcaaggtttcagaataaagatggcagtatagaaagttttgcatagaagcaagataataatatattataatagaaagtggaaaacaacataaagcccattgtggaaccagagttttgtcttcaagagctgaagatacttcataatattgggataaattcagaaagtgatatttctagattgggaaaagttggtccccaagatacattgttctagcagtactgagttatggagaaaaaatgttggtgtgtcaagatcacatgagtctggttaataaatgctactgggggtataagcttttctttgagaaatctcattgctcttatttaaaggtatctattctcaaaacacttctgtgagtcaaaaaggtaaaaaatgtattaggctatacatataactgttactgttattagcttataacaacaggaggacatatgaaagttgtgggcccgatgcagtgacttacacttataatcctaacactttaggaggctgaggcaggtgaatcgcttcagttcaggagttcaagaccagcctgaccaacatggtgaaaccctgtctctactaaaaatacaaaaaaattaggtgggcttggtggcccgtgcctgtaatcccagctgctcaggaggctgaggcaggagagtcacttgaacccgggaggcggaggttgcagtgagccaagatcgcgccattgcactccagcataggcgacagagcgagactccgtctcaaaaaaaaaaaaaaaaagaaattagccaggcatggtggtgcttgcctatagtcccagctactcttgaggctgacgtgggaggatcgcttgagcttgggagtttgaggcttcagagagtcgagatcacactattgcactccagcccgggtgagagagcaagaccctgtctcaaaaaaaagaagaaagcaagttgtgaatttctgtctttaccaaagcttggcagcctggagttaaggagtcctctgtctctactgaagcctaagagtggtcagtgaatggttagtatgaagtactttagaagaggggatgttgcccttacaaggcatattaaacttaacctgtcagattgcattcccagacatggatggttttatttctagagtttcccagctttatttctagagttgtatgtcttatgttagagaaggagaaaaaaactcatgcactaaaatgatatatccaaaggatatgtatttatcctcttaattttattgcaggccaggcatggtggctcacacctgtcatctcagcgctttgggaggctgaagtgggaacattgcttgagcccgggagttggagatcagcctgggcaacatagcgaaaacctgtctctataaaaaaatacaaaaaataatctgggtgtggtggaacacctcctaatcccagtttcttgggaggctgaggtgggaggatcacctgagcctgggaagtcaaggctgcaagtaggccaagattttgccactgtgcttcagcctgggcaacagagtgagaccctgtctcaaaaaaaaaaaaaaaaaaaaaaagttgcagaaaaactatgacctgcttcatggttatggtcagaaacaaaactgttttactccttctctagggcaggtgtagaaaaaaatgcctcttgcttatagaaagctgaattgtgagctgcgtttcctttatcagaaaagtctttcctgcaagttggtccttgccttctgtattcatcattttctttatcatccagatctttctcatttttactttagccaacaacactttgctaaaatactgtgttaaagatccagcttagccaggttattagagtcttgttctgctattttacagtctgcttatttttaggtttcacattcctcatgttgaagtagtgctacagatgtttatgattatcctactcagactgagcactgctttatgacttgctgcctttggggcatataccttacttgtagaaccagtgacagcactggtagtatatcagatgaagcaacccacccaacataccttcaggattgacccaggttgatagaatcccatcttacagcttgcaccctttcagacttttatatgctgggactagacattcctacctcataggctcagtgaataattggttttttagagatgggggtctccctgtgttgcccaggctggggtgcagtggctgttctccagcatagtaattgcacactacagctttgaactcctggcctcaagcaatgcctcagcctcctgagtagctggaattacagttttgtgccacgatgcctagctaggcagtgaagaatttttaacacatgaacatactatagaggataaagaacaaagaatacttttggttcaccagtattatttaatagggctttgtataggtgcttcgccaatcaagtatgaagatattctctcattttcctagttactgtgaaagaatacatagaatgacaagaagtgtctgttttttactgttttattcatcaagtcaggaagtgttctaatctgcatttggatttgatgttcagtaatttcagtattgtttattatgtgatttttcaacaaagtcagaaatccgttctacagccacagcacttcctctcattaagtagatgagccttcagttcacaaatgtgtcaaggctgatctcagcagcatatacttagaatatatatgagaaaaatgtttgctattaattttctcttgcctcatgttatcttctgaaaggaaaatcttggcctgaaatctgaactttgctgacagataaaagatgaatggccattacagtggctcacgcctgtaatcccagtactttgggaggccaaggcttgtgtccaggagttcgataccaggctggggcaacatggtgaaaccccatctttacaaaaaatacaaaaattagttgggtgtggcatgcctgtagttccagctacttgggtggctgaagtgggagggttgcttgagccccggaggtcaaggctatagtgcgctgtgattgtatcactgcactccagcctggacaacagagtgatactctttcaaaaaaccaaaagagagagaaaaaagttgagtatgtgctcagctatatacttagggtattatttttaggttataaaaattatttggatatatatttttaaacaagaaagagaattctggctgggtacggtggctcatgcctgtaattccagcactttgggaggtcgaggcgggtgaatcacctgaggtcaggagttcgtgatcagcctggccaacatggtgaaatgctgtctccacaaaaaatacaaaaattagctgggagtggtggtggacgtctgtagtaccagctatttgggaggctgaggcaggagaattgcttaaacctgagaggtcgaggctgcagtgagctgagatcgcgccactgcactccagtccagcctgggtgacagagcaaggctccgtctcaaaaaagaagaagaagaacaaagagagaattctggattctgcaaataaatttttaaaatttaatgcgactgccaagacatgaacttatcttgctgttatgttaacaagagcaagctgtaacactgtgggtgattatgtttttcttttttttttttttgagacggagtctcgctctgtcgcccaggctggagtgcagtggcgcgatctcggctcactgcaacctccgcctcccgggttcacgccattctcctgcctcagcctcccgagtagctgggactacaggcgcccgctaccacgcccggctaattttttgtatttttagtagagacggggtttcattgtgttagccaggatggtctcgatctcctgacctcgtgatccgcccgcctcggcctcccaaagtgctgggattacaggtgtgagccaccgcgcccggcctatgtttttctttagagacagcctttgagttggtgataagcttatgcactgaagatgccttgaccagcaaaacctgtgtcatgagaggcagagtcccacttttctgtatattatgcacattggaattctattttcattttaagctaagctgacatagaaagtagctttaaatgtcagaagcaggtttgtgatactcactagttacatccattttaacctctgttatcactactacttgaaatcatggaattatattggaaataaaattaaatattaccaaatacgaacttgacaagactataatttggcctaaaactgatccagatgatctcaagtgttaatttgaaaaatagttaccaatttttcttttttcttttcctgtttttttttttttttttttttttttttttgagatggagttttgctcttgtcgcccaggctggagtgcaatggcatgatcttggctcactgcaacctctgcctcccgggttcaagcgattctcctgcctcagtctccctagtagctgggattacagatgcccaccaccatgcccagctaatttttgtatttttagtagagacggggtttcgacctgttggccacgctggtctcaaactcgtgacctcaggccatccgcctgccttataactcccagagtcctgggattacaggcgtgagccacagcgcaggaccaatagttaaccaatttttcaaaccacaggaaataaaaattagccatgtcaacatggattaaacttaaatttttgtttaaaatgctgatttttagaaactaagctttttaaaaagtttcagttcattctatgatctttaatacatcagttcattctatgatctttaatacatcagttattcattttgagacatgttgaacaaataaattaggatacagcaggaatcccatcttttgaagaattcattggtaatgggacagagaagtcagtaattcaaaaacagcagaactgttaaaatttcaagtctacttaatttgtttactaaaagagaaaatgatatccacattttttttttttttttgagacggagtcttgctctgtcgccaggctgtaatccatctcggcacactgtaacctctgcgtcccgggttcaagcagttctcctgcctcagcctctcgagttgctgggactacaggtgcacaccgccatgcctggctaattttttttttttttcttttttgtattttagtagagacggggtttcaccatgttgcccaggttggtcttgaactcctgagctcaggcagtccgcccgcctctgcctcccaacgtgctagaattacaggcatgagctactgcgcccggccaatatccacatcttctaaaccttaatggggagatttcaggaaagcaggtaaaattttgtagactgggaacacgaaaacagggagaatcctaaagcaagaggcagttggggaacaagcagcagctttagatgcagtaattagagaactgagttctgcttcctatcccttgtatagaaagttactgtagatatttaggattttggaactgggtatattaaggaacgagatatgttaagtgtattaagaaaggaagtattttttagttgaataatgcctagcatataccttatattatattccttattttgtatatatatgtatgtatatatacacactctcaaattacattatattccttattttatatatatttttatatattgtgtgtgtgtgtgtgtgtgtgtgtgtatatatatatatatatatatatatatatattttttttttttttttttttttttttttgagacagggcctcactttgtcacccaggctagagtgcagtggcatgatctcagctcactgcagtcttgacctcccaggttcaggtgaccctcctgccttagccccggaagttgcttctctgtcccattaccaattaattcttcaaaagatgggactcttctggtatcctaatttttttatttgttcaacatgtctcaaaatgaataactgatgtattaaagatcacagaatggattcaaactttttaaaaagcttagtttctaaaaatcaagttgtacaagttgtggggctaaggcaggaggatcacctgaacctgggaggtcaaggctgtagtgagctgagatcacgccactgcactccagccagggtgacaaagtgagaccttgtctccaaaaaaaaaaatatatatatatatatgtgtgtgtgtgtgtatttatatatacaaatgtatatttaatatatatcaaatatatatattagtgggctgccagcacggcccactaatttttttgtattttttgtagagatgagggttcaccatatggcccaggctggtctcaaactcctgagctcaagcaatctacttgccttggcctcccaaagtgctgggattacaggcctgagccaccccgcctggcaccttactatattttaatgaatgaaatgatgtagtatggaaaaaaaaaaaatccctaaatggagacctgagtttccatctcatctctgctacttaattctgaggtttcaggtagattatttaacctatctgagttttcttatcttaaggataaagatgaattcacctaccctatgggactattaagaataaaatgaaggtcctgtgtaaaaaactaaataactgttcattattcttgctgctgttggttggattgagtagaaaggtcctatggttaggacattataaagtacgtctacttagcttctaagatgtaatatttctataacttcagtaaggatgtgcatttaatagtcaataaattaaaccttttaaagctgtgatttaaaaactataaaataaacaatgaaatgagaaatgggcaaattcaaataattttattttaccttgagcaagaagactatgccaatgctaatgctttgctttcccctgcccctgcccttcccaaagagaagagaacagacagcaatggcagagtatatttcgtcaaccacaacacacgaattacacaatgggaagaccccagaagtcaagggtaagaatagttacttgtgtatatttaatctcttaaagattataccttatttctaacaactgaagaagatcaaagttcatattcttttgccaaagacctaaaacgttaatcacctacatactttggaaagagaaaattatactattattttcatctaatggaaagtttgaagatttcttcaaagtgcaggaaaaaactttaactgggcatggtggctcatgcccattatcccagcactttgggaggccaaggagggaggattgtttgaggccaggaagacctgcgtaatgcagtgagaccctgtctctacaaaaaaaatccccaaaattgggtgtgttggcatgtatacctgtagtcccagctactcgggagactgaggtgggaggatcacctgagcccaggaagtcgagactgcagtgaactatgattgtgccagtacactccaacctggaggacaggttgagggctgtttcaaaaaaaaagaaaacaatagaaaagcaaaaaaaattatctggcacatgagaatatacttattaacatatatattatttttaattactaagaacagattagtgattctaaatcagggtttcttaacctgagatcactggttaagaatctagggtatgtggtttcaaggaggaagaaaatacatactcagtttcattactctttactggaaatttagtatcttcttccattatgaatgtaggctactaccatgtaggattaagaatgcctaggagtttgccatcagtagaagtcaaagggtgttaaaaaatattctgttgttgttgcagatatctctaaatacttgtttacacacataattacaaggacttgctaatttattaataaagagatatatgtacattatcacaaaggtctccctttgttgcccaggctgttctcaaactcctgtctttaagcgatcctcctgccttagcctcctgagtagctgggattacagaaataatgttttgacaattatgtatatataatggtttatctttgtaacatgttataatagtatgcatattagtttgctagggcgccttaacaaagtaccacagaggaggttgcttaaaccatagaaatgtatgtctcagggttctggaggctagaagcttgagatcacgatgtcagcagggccatgctcactcagaagatactaggaagagatctgttccaggtctttctcctggcttcttgtagctccttggcttgtggcagcatgaatccagtcttcacatggcactcttcctgtctgtatgtctatctgtacccaaatttcctgtttataaggacgtcagtcctataggattagtggcccacagtacttcagtatgacctcatcttgatacatctgcagtaactctgtttccaaataaggtcacattctgagttattgagggccaggatataaacgtgcatttggagggaggacacagttcaacccataacagtctgtaatactatgcatttatcagactgccagagggttccattctgcaaggaatttggcagactgtacagtcggagggcacagtcctccacaaaactgctgccctcacttcagacatcagcgacaatattgggggtccacaggatgactccagaccaactgtctacaaatttgggggcccccaccaccactcttaggtatgataagttactagaagtactgagaactcattgaaacctcttatagtcacatttattctagagaaagaatgcaaaataaaatcagcagaaggaataggtgcacagggcagagtctgggaggctctgaacatccagcattattgtgggacagtacacattgaggtcgagtatcaccaaccagggaagtctctggtatctagggtttttattggggcttgatcacgtactgccctcttggctgaccttttgtctccagtccttactggagatttgagctaatgccctttagtctctagttcctccagaggtcggaactgatgctccatgtcccacagccttgactgtccagtgatcaaagcctccaggcaaacaaagatattcccaatacgcagtgcattccaagggcctaaacatcactaccaagttgctgagggcaaaggccagacctctcttttggtataattataatttgagaacagatattccatggctcaaaagttttaaaaacttttgttctgaaggtatggtttaggttgcactgagctgagatcataccactgcattccagcttgggcgacagagtgtgactctgcctcaaaaaactaaaactaaaaataaataaaaaaagatatgctttcaacttaaaatagttttttctgcctaccaacaaatgaccattttctttttaaatggagttactgcatttacttaaatttattcagtttccataaaggaagaatgaagaatttcatagataacattttcttcctctttagaattttctaagaatagaattgaagaagtcacctttctataatttgctgccatttttttgtttcctcttagatgtttaaagttttatagctaaagttagaattctgctttaacaacacagatgacctagttctatctaatttattttcaagacaacaacttgttactgagcctatcttgcaagtataacaattgagaatcctcttttttacatttttggtagtctgttttatctgacatttgtattcagttaagtgaatacaggtttgttgttgttgttgttgttgttgtttgagacaaggtctcagtctgtcacccaggctggagtgaagtgacatgatcatggcttgctgcagccttgacctcctgggctcaagcaatcctcctgcctcagcctcccaagtagcttggactataggcatgggccaccacacccagctttttttttttttttttttttgggtagagacggtgtctctatgttgcccaggctggtgggaagttgttgccaaacacacaaactgaaatacttgattaaaagatgtcctggcagtatgtaggaaatacttttggaagacctaaagagaacgatcaatctatagttgtagtaggagtaataacaattacaacttgggctcactgtcactttttacctgtctcatttgttcctcatctagtctcatagacattgttgtctctgttttatggacaaagaacctaaagtttagagagattaagcagcttgtctagggtcacaagagttttcaaggtataaagataggtattaaggaggtggcatggaatacttcataaataacatattaggccttgtgtagtgtctcaacatctgtaatcccagtgctttgagaggccaaaataggaggatcacttccggtcaggagttcaagaccagcctggggaacatagtgagaccagtctctacataaaattttataatttaaccgggtgtggtggtatacaactgtagtcctagctactagggaggctgaggtgggaggattgcttgaacccaggagtttgaggctgcagtgaactatgatcatgccactgcactccaccctgggcagcagagtgagattctttctcttaaaagaatctttttttgagttgccttagtagaaaaacagtagatagataatatgggacaaaaggaaaggcttcatttggaggtgtggcagatcatatcttatttaaggaagtgctgagtggcctacactgtgaaatcatgggattcatgaaagggagttagaggtttgggtgcaaagggaacattgaggccagcgtatagaggctgagtgaatgccatatgaagaactttagatcttaatcattggtaatggtggaacagtgatagtactttacagagataactaatttaaataagatctctgttttaggatgatactctgttagcagtatcagtataagagcaggcctagagtgagatcagataaggaaaacgagttaggtggctgttcaaaaaatgcagaagatggctgggcgcagtggctcacgcctgtaattccagcaccttggaaggctgaggtgggaggatcacaaggtcaggagttcaaacccagcctggccaacatggtgaaaccctgtctctactaaaaatacaaaaattagctgggcgtgggcgtggtggcaggcgcctgtagtcccagctgaggctgaggcaggagaatcgcttgaacctgggaggtggaggttgcagtgagccaagatatcgtgcccctgcactccagcctgggcgacagtgagactccatctataaaaaaaaaaaaaaaaaaaaaaaagcaggagagaaacaaagccagagaaaggatggtgttggggattggaaatagagatgaacgtgaagatttctaaggcagaatggttagaacttggttaacaaaatgtttaggatgagtcattagctaatggggaacataagccaagtagacggcagaagacttgagttgtgtttgatggactttgagtttaacctgtttgtaggatgtccacatagagatgtctagtatacaactgaattactgaactgaatggttttctaaaagatttctgctatgtttattgacatttgtagcttctgtacttggcaaacaagcaactctttaatatttttgtttatgttttttcctgtgtttcgtagtcaattaaatgaaaagcccttacctgaaggttgggaaatgagattcacagtggatggaattccatattttgtggaccacaatagaagaactaccacctatatagatccccgcacaggaaaatctgccctgtaagttttctaaacattgtagattaagagtaaaatactagtccttcagattttgatataaagatttgtattagcaaggagtggaagtcttagtatttcttgagttagcttgacaataggtttctgttcattaagtattttgcatttccatctccctcttggatattttatcctagagattttcatatttgttaccatttgttcacacagcactaaatgaaactatttagaatttataggtattgtactgcttaccaattagtctctgatttctgattttcagcttctttcattcccttaactttttgacgttaaaaaagctctcattacttatcccccaccccatttctgagaaagtaaccttttgatttgcttatgtgctttatgacttcttttgtgggaaaatatataacctaaagtttcttgttttatgtgtacagttcagtggcattaagcacattcatattgtggcataatcattaccaccatccatctccagaatgttttcatcattccacactgaaacactgtaccctttaaacaataactttagcagacctggtaaccagccttctactgtctttctctatgaatttgactagtcgaagtacctcatattattggagtcatacaatatttatgcttatgtttctggattatttcactaaggtcatatcttcaagatttatccgtgttgtaatatgtatcaacattttcattccttattgaagctgaataatattccagtgtatgtatatatcacattttgtttattcacagatatttgcattgtttctgttttttggggggtattgtaaataatgctgctctgaacattggtatataattttctgcttgaggccgggcgcagtggctcatgcctgtaatcccagcgctttgggaggccaaggcaggcggatcacctgatatcaggagttggagaccagtctggtcaacatggcaaaaccccatctctactaaaaatacaaaaattagctgggcatggtggcgcacacctgtaatcccggctactcgggagtgtgaggcaggagaatcgcttgaacccaggaggcagaggttgcagtgagtcaagatcatgccacagcactccagcctgggtgacagagtgagactccgtctcaaaaaaacaccaaaaaccaagtatctgtttgagttcctacttcgatgacttttgtatctgtacccaaaagttagggttagggttagggttaggatgacttttgtatctattgctggattaaatattaattctgtatttaattttttgaagaaccaccatactgtttttcagtgtctgtgccagtttacatttccaccctagtgcagaagaattccaatttctgtacgttctcatcaactcttctgttttttttttcttcatcatcatcatatttttttttaaatagtcatccttaatgtcgtatttcattgtggtttttctttgtatttttctaatggtttgtgatgttgagtatcttttcatatgcttcttggctatttgtgtatcttctttggaaaaatgtctcttcaagtcctttgcccatttgttgttgttttttttttcttttgcgattgagttttaggtgttctctatatattctgggtgttaatcccttatcaaatacatgatttgcaattattttctcccattctgtggtttcctttttactgtagatagtgccctttgatgtataaaacattttagattttgatgtctgatttgtcaattttttcttttcttttcttttttgagacagtctctctctctgtcacccaggctggagtgcagtggcacaatctcggctcactgcaagctatgcctcccgggttcacgccattctcctgcctcagcctccgaagtagctgggcctacaggcgcccgccaccatgcccagctaatttttttttttttttttgtattttgtttaatagagacggggtttcaccacattagccaggatggtcttgatctcctgacctcgtgatccacccacctcagtctcccaaagtgctgggattacaggcgtgagccaccgtgcccggcctgttttttctttttttttttttctttctttctttcttttttttttttgagacggagcttcactctttttgcccactctttttgcccaggagtgcaatggtgcgatctcggctcaccacaacttctgcctcctgggttcaagctattctcctgcttcagcctcccgagtcgctgggattataggcatgcaccaccacgctgagctaattttgtatttttagtagaagacagggtttctccttgttggtcaggctgatctcgaactcccgacctcaggtgatccgcccgcctcagcctcctgaagtgttgggattacagatgtgaagctccgcgcccagcctgtcagttttttctttgtcacctgtacctttggtgtcatatccaagaaatcatttccaaatccagtgtcataaagctttgccctaagttctttttttttttgtagatagagtctcactctgtcgcccaggctggagtgcagtggcaagatctcagctcactgcaacctctaccgcctgggttgaagcgattcttttgcctcagcctcctgagtagctggggttttagctacgcaccaacacgcctggctaattttcgtatttttagtagagacggggtttcaccatgttggtcaggctggtctcaaactcctgacctcgtgatccacaccccctcagcctcccaaagagtagggattacaggcatgagccaccgcgcctggcctgagagttctttaattttagctcttacatttagatcttttatccattttaagttaaattttgtatatggtgttgggtaagggtccaacttcatctttttgaatgtgaatgtccaattttcccaagcaccatttgttgaaaagactgtcctttccccattgcatgactgtggcaccattgtcaatagcattttaccatatatgcaagggattatttctgggctgtttattctgttggtctgtatgtctgatttgccaataccacgctatagctttgtagcaagttttcaaatcaggaaggtatgtgtcctccaactttgttctttttttcaagctgcttttgactattcagggtcctttgagattccatatgaattttaggatggatttttttatttctgaaaaaaagaagtcatttggattttgataggggattttattgaatgtacagaatcaataaaatccatattgatcaatacagattcaatatctgtatcaatctggggtagtgtggtcatcttaacaatattaagtcttccaatccatgaatgtggatatctttgtgttttctttgatttctttcagcagtgttttgtggttttcagtgtacgagtcttttgccttcttgattaattcctaagtattttttattctttgtgatgctattgtaaatggaattgttatcttaattttctttttatattgtttattcttagtatatagaaatggaactattttgtgttgactttgtatgctgctactttcctgaattcacttactctggcagggtttttcgttgtggaatatttagtgttttcttcgtaaaagatcttagcttctgaaaacagataagttttcttcttcccaatttgggtatcttttatttatttatttatttttcttgcttaattcctctggctagagcttctggatactatgttgactacaagtggtgaaaataggcattcttatattgttcctcatcttaaagaaaaaacttctaaccattgaatgtgatgtttgctgttagatttttatatgtgccttttattatattgaggtagtttccctctattcctagtgtttcctatccctgttgtggagtgttttatcatgaaagtgtattaaattttgtaaaatccttttttggtatcaattgagatgatcatgtgattttttccccccctcattctgttaatgtggtatattatgttgatttttcataggttgaaccttttttgcattccaggaataaatcctacttagtcaaaaggattaaagtgtgcttttaatatgctgctgagatttttttgctgatttttttttagtatttttccatcagtgttcataaggaatgttgctctgtagttttcttatagtgtggctttcttagagcaaagatggttccctattactttctaattttatacttctacacattaacaacttttatatttaaagcagaaactggaaaatcaggccaatttggtattaatgaaattacagaggtaatttagatatgggaataaattaccgataatattattctatcattcattttagttacaataagtttgggtgcatataatagaaaacactaaaataatagtggtttatgtaagatagaagtgtatttgtccccattatttaaaaatagtccagcaggacttacaccacatcattaccattgctcaaaaaagaagttacaagaaaaatcaggaaatattttattttgaataataattaaaacaccacatatcacaatttgtgggatttaactaaagtagtcttcagcgggaaacttttgttttaaagaagtagatgagaatataggaaagataaaatcagtgatctctgcttttacattcagatgctagaaaaaggcaagttattaaacctaaagtaagtacaagaaaggaaataaataaaagcagaactcagtgaagtggaaaagaaacaatggagcgcccaaagctagaagataaatttttggtaaacattaataatattaacaacccttagtaattaaacctatagagaaaaaaagagggacatcactgtatattttatagacattaaaaggataataaagggtatatttatgccaataactttaacattttagatcaaatggacaaattctttgaaagatatgtcaccaaaatggacacaagaacagatagtaagtctaaatatccctatagctgataaatcaaatgcataattaaataatttttaagggcaggcccagtggctcatgccagtaatctcagcactttgggaggccaaggtgggcagatcacttgagctcaagagttcaagaccagcctaggcaacatggtgaaacccatgtctacaaaaaatacaaaatattagctgggtgtggtggtgcatgcctgtagtcccagttacttaggagggtgagatgggaagattgcttgagcccaggaagctgtggtgaaccgagatcgcgccactgtacttgagcctgggtggcagagtgtgaccctgtctcaaaaaaaaaaaaaaagaaaaaaaagatttctcatgaagaaaattctggcctagatggtgtcactggtaaggttcatcaaacttataagttataaattaatcagtcctattcaaattcattcataaaatacaagtgatggaaatgttttctttttcattttttttttttttttttttttttgagacggagtttcactcttgttgcccaggctggagtgcaatagcccaatctcggctcaccgcaacctcggcctccctggttcaagcaattctcctgcctcagcctcctgattagctgggattataggcatgcgccaccatgcctggctaattttgtatttttagtagagatgaggtttcaggccactgcattccaccctgggtgacagagtgacattccatgtcaaaacaaacaaaattggttaaaggagaaaaatcatacgataatttcaggaaaagcttgtgacataatacaatgcaaatttatgagaaactctcagctaccttggaaacttttttttttttttttttgagacggagtctcactttgtcgcccaggctggagtgcagtggcacaatctcagctcactgcaagctctgcctcccgggttcacgccattctcttgccttagcctcctgagtagctgggactacagacgcccgccaccacacctggctaattttttgtatttttagtagagacggggtttcactgtgttagccaggatgttctcaatctcctgacctcatgatccacctgccttggcctcccaaagtgctgggattacaggcgtgagctgctgcgccctgccggaaacatttttattggaaaaaaaaaatgtaacaaaagcttacagccaacatcacaattaatgatgaaataccgtagaacatcaagagtaagacaaggatatctactgtcattacttcattcaacattgtgtcagtattcctacccagtgcagtgagatgagaaaaagaaatacaggccgggcatggtggctcacgcctgtaatcccagcactttgggaggcccaggcaggcagatcacttgaggccaggagtttgagaccagcctggccaacatggctaaaccccgtctctactaaaaatacaaaaattagtcagtcatggtggtgggcacctgtaatcccagctactcaggaggcggaggcaggagaatcgcttgaacctctgggtcagaggttacagtgagcagagattgcgccactgcactccagcctgggagacagagcaagactccatctcaaaaaaaaaaagaaagaaaagaaaagaaatataagatgtataaattggaaaggaagaagtaaaactgtctcttttcccctcacacaaataacgtttgtatacagaaaatcatgaagaatctagaaaaaattactagaactagtaagtgaatttaacagcgtaacagaatataaagtcaatgtacaaaatcagttgtatttctacactgatatacattgaatttttaagagggagataatgcagtggtattaagtccaaggctagctgagaaaccccatggtgtcatagtgatctaaaattcttctgtcttttctaccatcctagagtatggtctcattcttcaaagtgacctcatggtctgtgacagctgctgaaacttaagctatcagggtcacactccaggctggaatttggaggaagggcaaattataaacacacacacacacacacacacacacactcacacactttttagctattttagctgtcttttagaaaatccttcctttttttttttagacggagtctagctttgtcacccttgctggagtgcagtggtgcaatctcagctcactgcagccttgacctctgaggttcaagtgattctcctgcctcagcctcccaagtagatgggattagaggcacctgccaccacacccggctaatttttataatttttagtagagacagagtttcaacatgttggtcaggctggtctcaaactcctgacctcagatgatccacccgcctcagcctcccaaagtgctgggatttataggtgtgaaccactgcacctggccaaaaagatccttcttgaacgtttcatatgccactttcacttagagacttaagtcacatggccatatagagaaatgtagtctttattatatgtagcattctacttagttaaatagcaagggttttacttaaagataaaggagggaattgatgttgggatagacagcattctcagatagaaacccctttacttagccctcttagatttggcagcatagaaaagaaaatcccacaacagtagtttcaacaaaatcaaagttttttgtttgttttttctgttacttaaaagtattcttggggaaatatctctcaaaaagcaaagaatggttttgttaggaatatgctatatttttgaatttggttagtaagtgctgagagagggtgggatattttgctttccttcagcattatcttttacaagcagctatatatgtcctgttaacccttgttcttcctcagagacaatggacctcagatagcctatgttcgggacttcaaagcaaaggttcagtatttccggttctggtgtcaggttagtattggaactgtatctctgtactgccttaactttgttgtgttgctttatattacacagtgattgtgaaaatacttaactcacagaaaaacaggtaaaatgggaagcattagaatctctttcatctatttttagagcaaataaatagatttatcaattagatcatttgtgactttggttattcagaaaattaaacctcatgtaatcccagcacttggggaggccgaggtgggcagatcacttgagctcaggagttcaggaccagtctgggcaacatattgaggccttacctctgtaaatatatatatatatatatttcttttttttaaagaagaaaattaaacttgaaaccatctgaataagcaaacattgtcactttttcctcagtagccattactttcagattgcaggaatcttcaaatgtaagtaaaagcattttctgatataattttaaccagctactttatttttatgtgttattttttctgagacaggatctcactctgtcacccaggctggagtgcagtggtgccatcatggcttactgcagccttgacctcctgggctcaagtgatcctcttgcctcagccttctcgctagctgacactacagatgcacttcaccacacctggctaatttttagtagagacagggtccccttatgttgcccaggctggttttgaactcctggattcaaatgatcctcctgcctcatcttccccaagtgctgggattacaggcataaaccagcatgcccggacaccagccatttttatatctatcgtttgatataactgactttgatagataaatacatgttcatacatacatgaacatgtccatacatagatgttatattcagtgtttttttcagatgtgatcaactatttcttatgtatagatatttactggaattaatgattttttatgggttctaaatcaaatgaatgccctagtcaaagttactgtgatgaatatttttacacttgaaactcttgtaattaactggacccatggaagcaagaagaatctggattaactgttggaaaataagattaagtaaagatttatttgacacattattaagtaagcagtgtgcatatgagatcaatcttgtggttcttctgtttgcatatattaatctgtaattagcatgaatactcacagatgcattggtaaacattattgaatataaatttatattcatagtctacttgtttctgtaaggaaagataaaagtaaataaaactttccccttttgatttttttgataggctattttaatgatgagagttgacttaagtcattcttctatttcagcaactggccatgccacagcacataaagattacagtgacaagaaaaacattgtttgaggattcctttcaacaggtactgtttcattctctcaataatttcccccctggctgctagcttaggacccgcttttggtgctgtcagtttaatctgaatggtttggaacttcttgagttgaagtccttgaatttttcaagtgcgatctcattgccagccaccttagggcttaaggggtgtgtgtgtgtgtgtgtgtgtgtgtgtgtgtgtgtgtgtgtttcaggtttccatttctaaactggtatgatttgaaataaatgcataggtaagataataggtttgtgtgtgtgtgtgtgtgtttcaggtttccatttctaaactggtatgatttgaaataaatgcataggtaagataataggtttttggtagccaaaggtctggaaatacccatatgaacattatcagattgtagaaaggagaggggaagacttgttttaacacttcagtattacttggatttttacaataagcgtatgttactcttaacaggaaaaaaagtggtcattggtgacagtatctaaaaaaagatatatatgagttttcagaagtagtcagcagattttttcacttgtcttcagaacttgagttaatttactcgctgggcacggtggctcatgcctgtaatcccagcactttgggaggctgaggcgggtacatcacctgaggtcaggagtttgagaccagcctggccaagatggtgaaaccttgtctctattaaaaatataaaaattagctgggcctggtggctgatgcctgtaatcctgtaaagctactcaggagagtcacctgaacctgggaggtggaggttgcagtgacccgagatcgtgccattgcattccagcctgggcaataagagcaaaactccatctcaatttaaaaaaaaaaaaaaaaaaaaaaaaacttgagttagtctactattcgcctttatcttgcagatattactaataacctactgcaactaaatgttaaaatgattgtgttatgtagaagattaaaataactagtgaaaaaatgtcttaaaatgaaaacatctggttagtccttgttttatagccagatgtggaagtgattattttcaagcaccagtggtattgtagcaactacagcttcaagaagtacggaattgaatgcaaagggaaaagaggttgagacagttggtggtagctggctacttgctttcagaatcagtttttttcatttcctaatggaacgtcagttattgacattaaaggaaaaagccagttggcatcctgctatgtaggagcagaaaactttttagtgggaagtggagctttactgaggccatttagagaattatgagtcatccccttgatctgatgtaagtgtcacaggccattccccaccctagtccttgcccatttctaattttatgttcataaccacccttttatcactctgttggacgagtttcttgaagcaacttgcttacctcttaccagtcctggaaagatgcaaaacatgattaaactgttcctttatcttttgactttgaaacctaaagtcttttgcaaaataactgactagatggttctaaaacagtttttaaagctgtcaccctagatttgacatccatcaaataactggttaataaaaatataagagaacaatttgattgcttaaaggtaacaaaactaattgcaaaattagcatcagattttctttggatagttgttggataaaattgctctgggatagtgtttcttctgttaacacagcacaactggttatgggggaaagtacaggagaaaacaattttttttccttcatattagacatttgttaaaaggaatttttttttaacttttatggatttatttatagtaaagataaggatacaaatgtcttccacacatatgtggtaatctgtggtgctcgccactccctccctcctgggactgacacactgcagcccacgctgctcaccctggagccccatccttgcatgagagaatggcgccacctggggctgtgcgacctgtcagcctgctcattcccttctccagctcaggacagagaaacacaattcattcataaggtttccattctgttataggcagagatttagaaatcagcattgtttttcaaagagtacaaagttaaaccattctgcttagaaaagaataaacccatccaatcatttttcctctagttgagtcaaaacagagatcaaacttctttgatagtgttatgtctgtgttcagacttagacttcagaatcaaaattttgaaatatttatgaggttaataactatctttgaagttaagcagtttactgagcaattaaatatttttgtccatacacattcagatttaactactgctataaattgtcgtaatttctccagtttcagtctgaacataatagcttatagtaataagacacaggttctagtacagattttccaattagtggtatggccctaaacaagccaggttagatctctgccttcacctacatcaaacaggaataataatatatttccttaacctatcttctaggtaaacagatgagattatatgaaaacattttgctaaagtcgctaaacaaacataagaaaaaatatgtaaggtttttctatcacattaactattttttaatatctgactgacatttttgtaatataaccaaaataaaaattgcatactttcttttttttttcttttattgatcattcttgggtgtttctcgcagagggggatttggcagggtcataggacaatagtggagggaaggtcagcagataaacaagtgaacaaaggtccctagttctcctaggcagaggaccctgcggccttccgcagtgtttgtgtccctgggtacttgagattagggagtggtgatgactcttaacgagcatgctgtcttcaagcatctgtttaacaaagcacatcttgcaccgcccttaatccatttaaccatgagtggacgcagcacatgtttcagagagcacagggttgggggtaaggtcacagatcaacaggatcccaaggcagaagaattattcttagtacagaacaaaatgaaaagtctcccatgtatacttctttctgcacagacacggcaaccatccgatttctcaatcctttacccacccttccccgctttctattccacaaaaccgccattgtcatcatggcccgttctcaatgagctgttgggtacacctcccagacggggtggtggcctggcagaggggctcctcacttcccagtaggggcggccgggcagaggcaccccgcacctccaggacagggcggctggccgggcgggggggctgacccccccacctccctcccggacagggtggctgccgggtggagacgctcctcacttcccagacggggcggctgccgggcggaggggctcctcacttctcagacggggcggttgccaggcagagggtctcctcacttctcagacggggtggctgggcagagatgctcctcacctcccagacggggtcgcggctgggcagaggcgctcctcacatcccagacggggcggcggggcagaggcgctccccacatcccagaccatgggcggccgggcagagacgctcctcacttcctagatgtgatggcggccgggaagaggcgctcctcactcctagatgggatggcggccgggcagagacgctcctcactttccagactgggcagccaggcagaggggctcctcacatcccagacgatgggcggccaggcagagatgctcctcacttcccagacgtggtggcggccgggcagaggctgcaatctcggcactttgggaggccaaggcaggcggctgggaggtggaggttgtagctagccgagatcacgccactgcactccagcctgggcaccattgagcactgagtgaacgagactccgtctgcaatcccggcacctcgggaggccaaggctggcggatcactcgcggttaggagctggagaccggcccggccaacacatcgaaatcccgtctccaccaaaaaaatacgaaaaccagtcaggcgtggcggcgcgtgcctgcaatcgtaggcactgggcaggctgaggcaggagaatcaggcagggaggttgcagtgagccgagatggcagcagtacagtccagcttcggctcggcatcagagggagaccgtggaaagagagggagagcgagaccgtggggagagggagacgggagaggcagaggcaggggcaggggcaggggcaggggcaggggcaggcagaggcaggcagaggcagaggcagagctgcatactttcaagaatgacaaaatttagtagttatacaaggtgaattaaaatagtaaagctagtcataatacagaatccactcatccatgtactcattttatcacttaaataataattataaaaataggtaaaattccatgaaaatattcctatttgttctagttcaggaggtcttgcccacatcaatggattgtctggcatcagccactgtttcaggcactcgaacagtcatattgtccatagattttgtcaaacagatttggcagcccaactgtgatctgttagtccatatgccagatcgagcatgtgattctcctcatcagtgattgcatctaacttctcatatatgtgatcttcaaagatgagatgacaggttaaacaagccagagttccctcacatgcaccaaagccatcaatatctggattattttcaaccacaacgtctagcagagaatcaccaacttttcctttggttgttaatgtttcaccatcacagtttataaagtggactgtcactttatcttctgagctgctccgcgcccctgccgacacgctcagcggccggctcgcctccgcgctccggcccggtccccggctcctcagcaggccgctggctccagcgcgggacccggcgtggtgcagccaccggccggccgggtcgccgaggaccgcagaagcggcgcgcagcagccgggcgcccccagcggcagccatcgcccgcggtcgggaactcaaaaggaattatttaaagatagttttaaccttgtgacatttctcatttgcgttgctgtatacctagcctatactatttgtagaatacttggcataaacgtacatatgtcataagcattgaagttttttgttacatctgggattttctggcttgagtgggatgtgaattcataaatgtgatggttttgtgggggaactgagagaacttggcataaacaggtatacttactgatcctctctggatatttaagtgtggtaattcattcttatcactcaataaagtataggcattatatcaacttctccctttccatgttcttctgtatttttttgtaagagtaattgatatatgcagtgctatacacacacaattttggtcaaataatttgttttacgtggcaggaaaccaaatgacctattgattgtagctcagtaatgtactgtccttcaaatatgaagatgatcctattaaccacctatagtgggacacaaaatttgagtagtttttgtaggtagttatcggttgccgctgagaatgagtttccaaagttaactgggtctctctgcagctactggttttcatttctcggttagccagttagctgttacgtgtacctttggctatgagtcaaaaccaaacctaataaccaaaccacaaaaaccccacccaacctctgaccatgcccatctatgttctaagtaattgatacaggcaacattataagtcaatagtagcatcattaaaaataaaatcacggccgggcatgatggctcacgtctgtaatcccagcactttgggaggccaaggccggtggatcacctgaggtcaggagtttgagaccagcctggccaacatggcaaaaccccgtctctactaaaaatacaaaattagccgggcgtggtggcgcacacctgtagttccagctacttgggaggctaaggcaagagaatcgcttgaacctgggaggtggaggtgtggtaagccgagattgtgccattgcactccagcctgggcaacgagggagagactgtctaaaagtaaataaataaataaaatcacgtgtataaggtatataaaaatatagatgtatataataaaatattattaaacgttactataatgtattttctgtatgtgtggttttgactagaccatgaacacctttctgtgtcatgggagatttcagttacctataacgaaggagatgtcaaacctagaagtggtagacagtgtttcaatagcttttttcaccaattattttactttatttttttttagataatgagcttcagtccccaagatctgcgaagacgtttgtgggtgatttttccaggagaagaaggtttagattatggaggtgtagcaaggtagtgataatatgaatactcagaacttagttcctttcctccaaaggtaccattgcacttcgcttgcaagtattattttctcaatcttatattttaggaaaatgaaatatgtcaaattattatacctttattatgctgtagctacagaatttcaaaaaacatttaattcagcactttctatgtcatgtacagctgattgatttcacccacatcactcatttaatcttcagggtaaccttgtgatacagaattttataggatgatgaagaggcttagagactcacctaaggcacataataaattgtagagcctggatgcaagctttgtatcatttaaccagtagccagtgttaagtctaccacctcttatatctgttccacagaaaacacaaggccttatagtgatcaggtcattttccccaccacagattactgatacaggtaatagttactcagtttccaactgagattagtatatttgtcatgaaaatatagaaggttgtacaaaataggagttgaaagtcttaattctgctttcttcatattggagcttaatattggaccctagaagatagtctctaatgagaattgctttgcttattccatgataatatatcacaccaggttaaaaatttgcgtagagctggcattgtgcaaagacaaggactttggggtcaagacgggatttgaatctttttctgctctcaatagtgtgatgttgggcaaatattttcatctgtaaaataagaatattaatatctacatttctaggattattgtgaagagtagaaatattgtttattaatgacctagttcagagcctgtgtctttgtgtgcacgctaattggtggctacattttagtagttcttatttatattatgtttctgagtttaaataaaattatttcaaaatatatgatataatcatagataaataacaaatatgagtagaaacatgtaattttgtataagttaaaggcaattgaagaggagagcaatcattcattcctaataagaaaataaactagcaatattaaagtgtgtcatgagatacacttatcacaagaggccatgaactaacaggaaaagagatccagattacaggcttatgccacatgtattaccccagatcacccatgttacgtagttttagtaaccataatcttatgttaatattggttcatattttcacaatatttgacttagagtctcagcatttttctaatatgtgagtggctggaattaagaactttactgcctctgtgaaattggaagaattttcatattgatttaacgtgtagggagtagtggcacttgatggggattattatgggacttagtaatagatggaatattagattgatttcagccactttactcacatgggtaaatagtgaattttaaatttgcctatgaatagtatttcattgattctaagactaatattttcattttataatatctctgaaattacgatgtatctcaggtaaaattggaaaatacaatttagtcgttcatcaaataaaggtgcaatgttgtcttagattttttgaaatgtaataatgtatatattaccatctaccaaagatggtgtatactaccaactctgtgaaacagatgtgagtttgaacagaagcaataaaaatcaacatgagattagaaaactatcactagctgaggggtatagatccctgagaactttatagcactgttctttgatttcttggtaacctacaagatttttcatcgtaaattttcttttgatttcagagaatggttctttcttttgtcacatgaagtgttgaacccaatgtattgcctgtttgaatatgcagggaaggataactactgcttgcagataaaccccgcttcttacatcaatccagatcacctgaaatattttcgttttattggcagatttattgccatggtaagtgcaggtcaagaattatgtttactttgcttattcagcaatactaaattttctcttaggtgccataacagatcatatgagagaaagggaagtggttttttgttttgttttgttttttatttttgagacagagtcttgctctgtcacccaggctggagtacagtgacacgatcttggctcactgcaacctctgcttcctggactcagtcagttctcccgcctcagcctcccaagtagctaggattacaggtgtgcgccaccatgcctggctaatttttgtatttttagtagagaaggggttttgctatgttggccaggctggtcttgaactcctgacctcaggtaatccacctgcctcagccttccaaagtgctgggattacaggtataagtcaccgtgcccagccagggaagtgtttttttgagacaaagtttcacttttgttgcccaggctagagtgcaatggcgtgatctcggcccaccacaacctctgcctcccaggttcgagcaattctcctgcctcagcctcccgagtagctgggattacaaacaagcatgtgccaccatgtccggctaatttttgtgtttttagtagagatggggtttctccatgttggtcagtctggtctcgaactcctgacctcaggtgatccacccacctcggcctcccagattgctgggattacaggcgtgagccaccatgcctgacccagggaagtgtttttaaatgaagagtacatctaatatattgaaataaaatgattattgtacagttattttaagcggtcttgtttccttttttcataggctctgttccatgggaaattcatagacacgggtttttctttaccattctataagcgtatcttgaacaaaccagttggactcaaggatttagaatctattgatccagaattttacaattctctcatctgggttaagtaagtttctttttccatgtaatttattaaaatatagttatatgcattccgtgtagtattgataacttatccaaactgtaggcacataattggtttattgtatttaaatgatctatatatcaaacctgtctttttattcaatatgataaattttacaaaaatacacccaagatcttcggcaataatatgaccttagaacagaatcttatttcttcttattttgatgttatagcttaatattaattatttaagaacatgggcctttcgttaaaaacttataaattatgattgaattggtggatataacaaatagtgctaatttcatttgtgcagggaaaacaatattgaggaatgtgatttggaaatgtacttctccgttgacaaagaaattctaggtgaaattaagagtcatgatctgaaacctaatggtggcaatattcttgtaacagaagaaaataaagaggaatacatcaggtgagagtgctccttttcacatttcactttttgtttgactacagcacattgataattgcttactaatactaatggagagtatctccaaaaatagtatttgtctctgtactaatcaatatcctatgtaggcagtcatttttcatttctaaaaagtttttttttaagtgtttttaaaagagttttaaggataaaagtcatgcaggatcactcttttaaacatcaactctgtaatcactatgctgtataacatgtcattaaaaagaatctcaaatatatatgcagatattttcatggggaatattgtaaggtgtattaatccactttcctgctgctgataaagacatatccaagactgggcaatttataaaaaaaagaggtttaatggacttacagttccacgagggtggggaggcctcaccctcatggtggaaggcaaggaggggcaagtcacatcttacatggatggcagcaggcaaagagagagcttgtacagggaaaactcctgtttttaaaacctcatcatcggccaggcatggtggctcatgcctgtaatcctagcactttggaaggccaaggcaggcagatcacaaggtcaggagattgagaccatcctggccaacatggtgaaaccccatctctactaaaaatacaaaaattagctgggtgtggtggcatgtgcctgtaatcccagctactagggaggctgaggcaggagaatggcttgaacctgggaggcggggattgcagtgagccaggatagcaccactgcactccagcctggtaacagagcaagactctgtctcaaaacaaacaaacgaatgaacaaaacacttcatcatatcttgtgagacatattcactgtcatgcaaacagcaggggaaagacccacccccgtgatcccatgattcagttatctcactgattctctcttacaacacatgggaattatgggagctacaaggtgagatttgggtgaggacacagagccaaaccatatcattctgcccctagcccctcccaaatctcatgtcttcacatttcaaaaccaatcatgccttctcaacagtccccaaagtcttaacttatttcagcattaactcaaaagtccacagtccaaagtctcatctgggacaagggaagtcccttccgcctatgagcctgtaaaattaaaagcaacttagttacttcctacatacactcagggatacaggcattgggtaaatacagccattcaagatgggagaaattggccaaaacaaaggagctacaggccccatgcaagtttgaaatccagcagggcagtcaaatcttcaagttccaaaatgatctcttttgactccatgtctcatatgcaagtcaccctgatgtaagaggtggcctcccatggccttgggcaacactgcccttggggctttgcagggtatagccccccaccggctgctttcatgggctggcgttgagtgtctatggcttttccagtctcatgctgcaagctgttggtggatctaccattctggggtctagaggacggttgccctcttctcacagctccactaggcagtgccccagtagggactctgtatgggcctccaacttcacatttcccctccacactgacctagcagaggttctctgtgagtgccctgcccctgcaagcagacttttgcctgggcatctaggcatttccatacgtcttctgaaatctagagggaggttcccaagcctcaatttttgccttctgtgcaccctcaggctcaacagcacgtggaagctgccaactcctggggcttccaccttctgaagcaacaacccgggctgtaccttggccacttttagtcatgctggagcagctaggaaacagggcaccaagtccctagagtgcacacagcgtggggaccctgggcccggcccatgaaaccatttttagctcctaggcctgcctacaggcttgtgataggaggggcttccatgaagacctctgacgtgccctgtagacattttccacattgtcttggggattaacattcgggtcctcattacttatgcaaatttctgtagccagcttgaatttctcctcagaaaatgagattttcttgtctattgcattgttgggctgcaaattttccaaacttttatgctctgcttcccttacaaaactgaatgcctttaacagcacgcaagtctcctcttgaatgctttgctacgtagaaatttattccaccagataccctaaatcatctctctcaagtacaatcgtctctctcaagtacaaatccaccagtctctagcacaggggcaaaatgctgccagtctctttgctaaaacatacaaagagtcacctttgctgcatttcccaaaaagtttctcatttccatctgagaacacctcagcctggactttattgtccatattgctgtcagcattttggtcaaagccattcaacaagtctataggaagttccaaactttcccacattttcctgtcttcttctgagccctccaaactgttccaacgtctgcctgttacccagttctaaagttgcatccacattttcagttatcttcagcagcaccccactcctggtaacaatttactgttttcacactgctgctaagacatacttgagagtggacaatttacaaaagaaagaggtttaatggacttacagttccacatggctggggaggcctcacaatcatggtggaaggcaaggaggagcaaggcatgtcttacatgaatggcagccggcaaagagagagcttgtgctgggaaactcccattttaaaaccatcagatcttgtgagacttattcactataatgagaacaacatgagaaaggcccgcccccatgattcagttatctcccactggttctctcccataacacataggaattatgggagctacaagatgtgatttgggtggggacacagagccaaactatatcataaggttgggtaaaatttataactaaaatgatgttttatagtatatcctttctgattatttccattggttcatgctactagtctcaagagctaatagttcattcataccttctcaatagcaattctttccagccagggttaaattttgcatatttacttcttaagttccaggttctgcatttcttgcctggtttttccctccataattgaaagtatactatttaacacagtgagctgtcattatttcttggacaacaatctatccttttaaaagtttattttgaaatctgcttttaaaatgtagtcaattcgtttttgtcaattctccagtttttttgttatgatatgtctagattttcttatgacatatatagcattccagagaggtaatgtttcgagattccaagagatgtactacgtttctcaatagttttgttgctggtaagataacattttaagataatgggcagctaaaaaggtttttagtatctacttcaataatggcttgcttaaaatttcagagtttggggggtttttagtattattttaagaagtataatttccttagaataaaatgcactgatcttaagtgtagaagttgaaatttgacaaatatatatatcagcccaaatgtgagcattttatggagagaagttgtgctagatcactcatttaattaccaattctgtaaacactgttccatatagcatcatgtccatgtaaatatgacccaaattgtggaacttttttttctattctggaccccataaggggccaatgcacacctcccttctcccagccccagaggtaggtaaccatttctgtttagttctatttctataactgtttctgatcttaaacttcctaaaatgaaatcatagagtatgtactcttatatctagcttttagtgtctgattttttcttttatttggtgtttgtgagattcagccatattgtttatatcagtattttattcctttttattgctgagaaatattccatgctgtgtatatctcaaaatttgtttatccattctcttggtgataaatgttttggttgtttctcagtctggggcttttatgagtaaagctgctataaacattcttgtgatatctttttgtggacatatttttcttgagtaaatacctaggagtgaaatcgctgggaaggtgtttgactttattagaaactgccagtttcccaaagtgtttttgccattttgcagtcctactagtagtatttgagagttgcttcacgttcttgccaattcagcattgtcagtaatatctcgtggttttaatttccatttcttccttgactaatggtgtcaagtacgtttttctatgcatattgatcatttgtagctcttcttttgtgatgtgtgtatccaaatcttttatccattctaaaattgggttgtctttttatttgtgattgttggagttcttaaatatttcagatcattgattttagaaactcttctctttcccttcttccctccctcttcttaccttttcttacgatacgtctagatttcgttcttctttgacggagtcttgctctgttgccgaggctgaaatacagtggcacgatcagagctcactgcagtcttaaactcctgggatcaaaggatccccctgcctcatccttctgagtagctgggactgtaggcacaagccactgtgcccagcaaattttttggttgtttttatttttgtagagatgtggtcttgctattttgcacaggctggtctcagactccttgccttaagctatcctcccacattctgttttctaatataaggatttaaagctgcatatttccaactaagtatttctttagctatatcccacaattttttgttgttttttttgagatagagtctcactctgaggttgcccaggttggagcgtagtggtagagtcatggttcactgtagcctcaacctcctgagctccagatagcctcccacctcagccttccaggtagctggaaccacaggcatgtactaccatgcctggcttacttatttatttatttattgtaggagatgggtcttactatgttacccaggctggtctccaaactcctggatccaaacgatactcccactttggtctcccaaagtgctggaattataggcatgagccgccgcatccagtccacacctttttttttttttcccccgagacagagtcttgctctgtcgcccaggctggagtgcagcggtacaatcttggctcactgcaacttccatctcctgggttcaagtgattcttctgcctcagcctcccgagcagctgggattataggcacccgccaccacgcctggctaatttttgtatttttagtagagacggggttttgccatgttggccgggcttgtcttgaactcttgacctcaggtgatccgcctgcctcagcgtcccaaagtgcctggattacaggcatgagccaccacgcccagccacaaattttggaatgttgtgtttttcactattttatttattttatttatttatttatttattatgttttatttttattattaatatttttgagacagggtctcactttgtcacccaggctggagtgcagtggtgaaatcttgcctcacggcagcgtccaattccagaagttcaagcgatcctctagcctcagccaccaagcagctgggactacaggcatgtgccaccacacccacatgacgagatggggtttcaccgtgttgcccaggctggtcttgaactcctgtgctcaagggatccacccacctcagcctcccaaagtgctgggattacagatgtcagccaccacatccagccactctcattgtatttaaaagtatttgttaggtttttttttttttttttttgagacgtagtctctctgtcacccaggctggagtgcagtggtgccatcttggctcactctaagctccgctccctgggttcacgtcattctcctgcctcagcctccggagtagctgggactacaggcgcctgccaccacacctggctaatttttttgtatttttagtagagacagggtttcaccgtgttagccaggaaagtctcaatctcctgacctcgtgatcccctcacctcagcctcccgaagtgctgggattacaggcatgagccgccgtgcccagccaggtcttatttttatcctgataatctctactttataattggagtgttcagtacatttatgtttaattttattactgatttggttggacttttgtctaaccattgctatttgttttgctatttgtctcgccttgctatttgtttcttatttttcccaactttctttgttctttcttgccttctttgaataaagcaatttttactttcttttttagctcttctgttggttttttagctatacctctttgtttaactttagtggcaactctaatgattatgataatatgcatctttaacatccctgttgacccaaacactacttcttgtacaatataagaagctcataggccaggtgcggtggctcacacctgtaattccagcactttgggaggctgaggtgggcagattgcctgaggtcaggagttcgagaccagcctggccaacatgatgaaaccccgtctctactaaaaatacaaaaatcaactaggcatggtggcaggcacctgtaatcccagctacttgggaggctgaggcatgagaatcgcttgaacccaggtggcggaggttgcagtaagtcgagatcacgccattgcgcttcagcctaggggacaagagcgagacttcgtctcaaaaaaaaagaaaagaagctcataataatataattccatttacctcactccagctctttgtggtgttgttgtcatatattatttctacgtgtcacaaatataatactttgttactgttattcttgctttaatttttaactattttcaaaaataatcttatatttactcacattactatttctggttctccttatttctttcctcagattcatttttttttttaaatctaagataatttccctttggctttaaaaaaaaaaacctttctttaccatttcacttagtgtgcatctcttggtgatgcattttctcagcttttatatgaaaacatctttatttcaccttcattttttgaaggatattgtcactagatttagaattctaggtttataaaataatgatgcggtcatgtttttatgatttatgttttaaaaaataatcctcatgtcgtagagacaaatactgaagtatttgttcaaaatgaaattatctgggctgggcgtggtggttcgtgcctgtaatcccagcactttgggagaaggcaggcagaacacttaaggtcaggagttcaagaccagcctggccaacatgatgaaacccccgtctctactaaaaacacaaaaatcagttgggtgtggtggcgcacgcctgtaatgccagctactcgggaggctgatgcacaagaactgactgaacctggaaggtggaggctgcagtgagcccagattgtatcattgcactccagcctgagtgacagagcgcgaccctgtctcaaaaaacaaaaacaaaataaaagaaaaaaaaagaaattatatggcttggcaatggtggcacacgcttgtaatcgtagcactttggatggcggaggcaggaagatcacttgaggccagatatttaaaaccagccttggcatcacagagagacaccatctctacatacaaaaccaaaaatcagccaggcgtggtgttgcacacctatattcccagctactcgggaggccgaggtaggaggattgcttgagcccaggaggtcgagactgcagtgagccaagattgtgccactgtgcttcagctcaggtgacagagtgagacctcatctcaaataaataaagaaatgaaattatatgatatctagggtatgagtaggggcatagatgaaatagatgggcattgtgatgaagcttggacatgtgtacagggggttcattatgttctatttttgaatatattttaagttttttataattttttaaaatttatttttatactcagaatttaaagataagatctaaacttcctgataggttttttcatatttgtttgccagaatggtagctgagtggaggttgtctcgaggtgttgaagaacagacacaagctttctttgaaggctttaatgaaattcttccccagcaatatttgcaatactttgatgcaaaggaattagaggtaatgaattttccttcattcccctgtaccatgctagtaaataatgccttaagttgtctgcttttaactcactttcccatctttcctgttactgtaatatttttatactggggcaaaatgttttgaaacatccccaatggttaaagaaaatcataatttatccaaagataaaacaatagtattaccccctccaaagtacaaatattagagcttctctacaattgagtgacttacttccctgaatatgtatatgtatgacaccgtgcatggaaccttgccttcatgagcaatgtagatataattcttgatgtatagttgataagtcaaagcctactgattgttattctaaagctttgcttaatcttagtctttcctatgtccagctgtttttgtacagttaccttaggaaacaatttgtctttttcatccctaaaggtccttttatgtggaatgcaagagattgatttgaatgactggcaaagacatgccatctaccgtcattatgcaaggaccagcaaacaaatcatgtggttttggcaggtttgtttttaaatttatttctattagttgacacagcataattttttagaatttgcttaccacatatggaaatgagtcacaggtcaaaatgtaccagtgtatatagaccccttagtccatgcattataataaatgaatacagattataacagcatccttttaagactattgccaagtaagccacacataccttgcatctttgtccaaagtagagtgtaagacaattcgagatgataaaatttacctacatttgatttaaatggttttggggttttataggactgtctgtagtatgttttttatcatttatacttcattaattatataatgttcagaaggcaaaatttaagagacttggtttagaatcataacggtatctctctaaaaatgtctgccttaagcatggtatatgatgttcaacatcattagtcattagagaaatgcaaatcaaaaccacagtgaggctgggtgcggtggctcacacctgtaatcccagcactttgggaggctgaggcgggtggatcacgacatcaggagatcaagaccgtcctggctaacacggtgaaattagccgggcatggtggcacatgcctgtaatcccagctacttgggaggctgaggcaggagaatcacttgaacctggaaggcagaggttgcagtaagccaagttcgcactactgcactccagcctgggtgacagagcaagactctgtctcaaaaacaaaaacaacacaatgagataccacatcacacttagtattatttttgaagtggagaagaacaaccattgccaagggcgcattgctggtgatagtgtgaaataccacaccactgtggaaatagtttggtggttcctcaaaatttaagcatagaattaacataagatccaggaattccaatccttggtatacagcccaaaaaattgaaagcagagacttaaacagatacttgtacaccagtattcatcattcatttaccgacacaaaatgtggtatatgcatatacagatgctcctggacttggagttttatcctttatatccatcataagtcaaaaatatcttgagttgaaaatgcatttaatacccttatcataacttacccattgtaaagttacattgtaaagtcacaacttacccattgtaaagttgaaaaatcataaatcgaaccatcataagtctaggtgctcctcaacttatgatggagtaataaacccaataaacccatcataaagtcaaaaatttgtaagccagggactgtctgtgttggaatattattcagtgctaaaaagtaatgagatttttggtatgtgctacaacatgaacaaaccttaaaaacattatgaattttaagataagcgaagtaagccagacacaaacggacaaatactgtataattccacttacatgaggttactagaatgggcagcttcatagaggcaaaagtagaatatgggttaccagaagttgcagggagcaaaaatgggaagttgtgtttaatgtgtacataggttttacttgggatgatgaaaaagttggaaatagtggcgatggttgcacaacagtgtgaatgtacttaatgtcattgaattacactcaaaatggttaaaatcgagaatttatgttgtgtatattttacaaaaatttaaaaaattaaaaaaatctggtatacatgtaaaaaaattcatatgagaaacttaaactgagcttctataacaagtaggattacaattgtaggataattaataatactacaataggataaaaattattccttataaaaaagtttttggctgaggcaaaacagttatactacaggctagaaacattctctagaaacctattgttttgagtcagaattgtatgaaataaaaaccacataattctagctatgtgtagctataccaaaacctaaagaacattgagaagaggaggttattgggatatatcctgcatcagaattctgtgagtttgattaaagttgtttattaaaccaaaaagtctgtactgactcaaggtctgtatcctgtgtagccacatgaatatcctataggacgggcaaatctggggctggggggtggtggtgggatggggagtcacaggaagggctgccctagaagagctaatcttaaaactgcgtgagtacggagctcttggtctcagtccatcttactttttatatatccctttaagtatattgtcctaagatttatataaggaaaggttgatggggctttgataaacatggaaatggccctccatccatagtgttaagtaattatctaatgcagtggacaccagagtttcctttaagatttgaaatgagctagatacagtggcttgctcctatagtcccagctactctggaggccgaggcaggaggactgcctgctgcccaggagttagaggctgcaatcagctatgattgcatcactgcaccccagcctgggccacagagcctgggacacctcacctctaaaaaaaataaaagatttgaaatcattatttttctttcttgtttagtgtgctgaatgtaacatatgacatatatatctctttaaatatacttttaacagtttgttaaagaaattgataatgagaagagaatgagacttctgcagtttgttactggaacctgccgattgccagtaggaggatttgctgatctcatgggtatgtatacaggatcacttttcctatacagaaaattgtttatcatgctgctttacgtaaatgtgtatacagcctattagaaacaacaaagacagggatagccattttcttaactattcccagttagcatggatttgtataacctttaaaatagtttttagtacttacctttgtagaaatttttaaccctcaagctagaacccacagctaactcattaggacagcagtcttctgtatgtaaatctgttcatttagtcatttgccaaacatgtgtgtcttaagagtcaatcactattggttgtattatttaacgatgtgagaagatcattatataatacaatagtggattgtagttttagtattgtgtttaaaaccactcttccctgggagactgggagttctttgagaaatggattcatatcttcatctttttatttcttgcccctggcaaagtgcctgttacacagcaatctgctgcttaaaatgaatattaagatgaatgactatggcaatattcactttgttactaaacagtaaattatttaagtaaattcaagtatttccttaataccaacattatcccaagtatcataggaggatacacagagaagttaagatcccaaagcctgcttcagactgaagcagagagtcaaaattagaactaagcaggtaattttgaatacagaacatggaaccagtttagaaagtactttaaaagccagaaaaagaatttggatattaccgtgagggtattggaagctgtggaactttttgaagagaggaaaacttgctcaagctgcatttaggaagatttgataggaagatacagtgtggattaaaagatggtgaggacctagagataagaagaaatcattgcagcaatgatgagaacctgatctcaggagatgaaagtagaaatagaaaagagggggtagatactaggtaaagttccaaaggagaaacaggtagagagcttaatagaaaatgaagtataagagaggggtatcagcaataattgtcatgttatggaacatggagcaatggagaagttaggaagtataaagagtatgcatcgttgtagatgttgggggaggatgctgagcagcttagaacctgctgaatttaaggtaactgctggacaaccaagtagaaaaccccagggaagcagctgtagaggtaacaatatatgagttagagttaagaggaaacagaagaagttgaatcatcagagcagtgacatttgatgctgtgagaatgtgtggtcttaggcagaaatagaatacagagaggagtagaaggctaatgcctagaaccatctgcatgtagggataagacagaaggagatagcctaggccaggcacagcctcacgcctataattccagcactttaggaggctgagctgggtggatcgcttgagctcaggagtttgagaacagctgggacgacatggtgagaccccgtctctactaaaaatacaaaaattagccgggcgtgttgacgcacacttgtagccctggctactgggaaggctgaggcagggagaatcgcttgaacccgggaggcagaggttgcagtgagctgagatcgtgccactgcactccagcctgggaaacagagtgagactccatctcaaaggaaaagaaaagatggaattagtctggaagccaatttaaaggagagaccagagagtgaaaagaagaaagaaatagtatactgtctgagaagcaattagaaggaatttttttcttcagtgctacagagaggtctcagaagggtgatttctaggaaagtttttgttaggagacagaaacagtgagattgtggtttggagaattttagaggctatctagtttattttgtttgttttagtttcaaatctttattcttttttactttttaaattattcttaattgacataattgtacacatttaggggtacagtttttattttgatacatgtatacaatatataatgatcaaattggggtaattaggatatccatcacctcaaacatttatcaattctttgtgttgggaacattcaaaactcacttttctaactatttataaacatacagtccaggtgcagtggttcacacctgtaatcccagcactttgggaggctgaggcaggaggaacacacgagcccaggggtttgagacaagcctgggcaatatagggaaaccctgtctctacagaaaatttagaagttagctgagcgtggtggtacatgcctgtagtccctgctattcaggaggttgaggtgggaggatcacttgagccttggaggtgaaggttgcagtgagccaaggtcatgccactgcactacagtctcagtgacagagtgagaccctatcttaaaaatacatacactgggcgcggtggctcacgcctgtaatcccagcacgttgggaggccgaggcaggcggatcacctgaggtcaggagttcgagaccagcctggccatcgtggtaaatccccttctctacgaaaaatacaaaaaaaaaaaaaaaaaattagccaggtgaggtggtgggagcctgtaatcccagctacttgggaggctgaggcaggagaatcacttgaacctgggaggcagaggttgcagtgagtcgagattatgccactacattccagcctgggcgacaagaacaaaactccaactcaaaaataaataaataaataaataaataaaatatatatatatatatatatatacacacgcacacacacacacggtaaattgttgttgattatagtcattgtatagtgctatagaacactagaacttattcttcctgccgatctgtacttgtgcatctattaaccaacctttggctctcccctcattcctgccacccttctgtagtaaccactgttgcactttgtacttctatgagatcggctttcttagctttcacgagtgacagcatgtagtatttatctttttgtgcttggcttatgtcacttaaaacgtcctccatgttcatctatgttgtcataaatgacagaattttgcttttttaaaaaatgtctgaagtattccagtttgtttatacaccacattttctttatccgtttacctgattatggacacataagttgattccctatcttggcccttgtgaatggtgctgcagtagacatgggagtgcagatgtctgttcgacatactgatttccttttctttagatgaatgccccatagtgggattgctggatcatatggttgttgggcggctgagatgggtggatctcttaaggccaggagtttgagatcagcctggtcaacatagtgaaaccctgtctctactgaaaatactaaaaaaaaaaaaaaaaaaaaaaaaaaattagctgagagtggtggtacacgcctgtaatcccagctgcttgggaggctgaggcacaacaattgcttgaaactgggaggcagaggttgcactctagcctgggtgacagagcaatactctgtctcaagaagttaagaagaagaatttacatccctgccaacagtatataagagttcctctttttccacatccttgccagcatttgttattttttaatctgtaacagttattctaactgaggtgagatgatagttcattgtggttttgatttgcatctccctgatgattagttatgtttaacattgttattttgagagatatctatttagctcatatcccattttttaatgcattgtttttcttcttttttgctgttgagttcttgtatattctggatattctttgttggatgaattgtttgcatatactttctcccattctgcagattgtctctacactgtgttgattgtttcctttgctatgccaaagctttttagtttcatataacccaatttgtctatttttatttttgttgcctgtgctttttatgtcctctttataaaatcttggctcagggccaggtgtggtggctcgtgcctgtaggcccagcactttgggaggccgagacgggtggatcacctgaggtcgggagttcaagaccagcctgaccatggagaaaccctgtctctactaaaaatacaaaaattagctgggcgtggtggcgcgtgcctgtcatcccaactactcaggaggctgaggcaggagaatcacttgaacccaggaggcggaggttgaggtgagccgagatcgtgccattgcactccagcctgggcaagaagagcaacactccatctcaaaaaaaaaaaaaaaaaagaaaagagaaaagaaaaatctttgctcagacctgtgccctgaagcatttttcctgtttaatccattttgagttgatttttgtacgttatgagagaaaggggtctactttcatttttagcatatagatttctgttattccagtaccatttattgaagagagtgtcctttcccccaatgattgttctttttttttgagacagagtctcactccgttgcccaggctggagtacagtggcgagatctcggctccccacaacctccgcctcccaggatcaagcaattctcttgccttagcctcctgagtagctgggattgcaggcacgcaccaccacacctggctagtttttttatttttaatagagatagggtttctctatgttggtcaggctggtcttgaactcctaaccttgtgatctgcctgcctcagcctcccaaagtgctgggattacaggcatgagccactgtgcccagccaatgattgttcttagtgtctttattgaaaatcagttggatgtaaatatgtgggtttgtttctgggttctctcttctgttccactggtctatgtgtctgctattatgccagtaccatgctgtattggttactatagctttgttgtatatcttgaagtccagtagtgtgatgcctccagctttttgttcagaatggctttggctattcaggatcctttgtagttcagtatgagttttaggattgttttttctatttctgtgaagaatgtcattggttgtttttgtttttgtttttgttttttgagatggaatgtatcactctgtcacccaggctggagtgcagtggcacattctcagttcactgcaacctctgcctcccgggttcaagtgattcttgtgcctcagcctcccaagtagctgggattacaggcatatgccaccacacccagccactttctgtatttttagtagagatggcatttcgccatgtgactggtctggtcttgcactcctgaactccggtgatccgcccaccttggcctcccaaagtgatgggattacaggcatgagccactacacccagccgtcattggtatttctgtagggattgcattgaatctgtagaaatttttaatagtacggttattagtggagtattaatttttcaacccatgaacatgggatgtctttacattttttgtgtgttttcttcagtttcttttgtcagtgttttatagtttttgctgtagagatcgttcacctccttggttaaatttatttctaggtttttgttgtttgtagctattgtaagtaggattgctttcttgatttctttttcttctagtttgttgttttatagaaacgctgctgatttttgtatgttgattttgtatcctacaactttacttaatgtgtttatcagttccaataattttttattggtggagtttttaaggttttctgtatataaggtcatgttgtctgcgaacaggtatagttcaacttcttcctaattctgatgccctttatttctttctcttatctaattgctttggctgggacttccagcagtttgttgaataaatgtggtgaaagtgggcacccttgtcttgttccatatcttggaggaaaagcttttagttttctctgttcagtatgatgttggctgtggatttgtaatatatagcctttattatgttcaggtacattccttctgtgcctaacttgttgagagtttttcttatgaagtgatgttggattttattaaatattttttctgcatctattgagaagatcatatggtttagcccatcattctgttgatatactttgttatgttcattgatttgtatatgttgaaccatccttgcaacctttggatctttttaatgtgttgctgaatttgatttgcttgtatttcattgaggatttttgcatctgtgttcatcaaggatattggcctatagttttcttttcttttcttttcctcctttttttttgtttttgtttcttgtatccttgtctagttttggtatcagggtaacgctggccttgtagaatgagtttcaaaaaattctctcttctattttctggaagagcttgaaaagaattggtattagttcttctttaaatgtttgttagaattccattggttcctagacttttgttttctttgatgggagactttttttttttttcttgagacagagtcttgctctttcacccaggctggaacgcagtggcacgatctcggctcactgcaacctccgcctcacaggttcacaccattctcctgcctcagcctcccgagtaactgggactacaggcgcctgccaccatgctcggctaattttttgtctttttagtagagacggggtttcaccgcgttagccaggatggtctcgatgtcctgaccttgtgatccgcccgccttggactcccaaagtgctgggattacaggcgtgagccactgtgcccagcttttttttttttttttttttttttttttttttttgagacagtcttgctctgacacccaggctggagtgcaaatgggagactttttattacagattcagtcatgttacttataattgatcttttcagcttttctgctttttcttggttcagtcttggtaggttgtatgtgtccaggaatgtatcaatttccataggttttctaagttggtgtgtagttcataataatttctaaaggtcctttgtatttctgtggtgtcagttgtaatgtctcccttttcgtttctgatttcatttatttgggtcttttcttggttagtttagctaatggtttgtcaattttgtttatcctttcagaaaaaaaaaacaacttttcatttcatctatcttttgtcttcatttttagcctcatttttgtttatttctgttttgatctttattatttctttccttctagtaattttgggtttgctttgttcttttctggtttctcaaagtgtatcattaggtcatttgtttaaaatctttccacttttttgatgtaggcatttattgctataacattaccttttaatattggttttgctatattttataattttcaatatattgtgtttccatttgcatttgtttcatggaatttttaaatttccttttacatttccccattggtcattctggagcacgtttaattaccatgtatttatacaattttgaaagttcctctttttattgatttctagtcttactccattgtgttcagaaaatatatttgacattatgacttcagttcttttaaatttgttgagacttgttttgggtcttaatatgtggtttccccaggagaatgttccatgtgctgatgacaagaatgtgtattctgaagctgttggatgaaatgttctatgaatgactgttaggttcatttggtctgaagtacagtttaaatccaatgtttctttgttgattttctgtctagatgatctatccagtgctaagagtggatattgaagtccccaactagtattggagtctgtctttcccttttaatataataatatttcctttttatatctgggttctttggtgttgggtgcatatataactctcatatcctcttgttgaattggtccctttatcattatagaatgccctttgtctctttttatagtttttgatttaaagtctgtttgcctgatatatgtatagctactcctgctcactttggatttccatttccatgaaatatctttttcatcccttccttttcagtctgtatgtgtctttacgggtaaagcaagtttcttggaggcagcatatgatagttgggtcatttttctttttaaatctattcagccagtctatatctttttagtagggaatttatccacttatattcaaggttattactgatagatcaggacttactcctgtcatttttaaaattactttctggttgctttatatatccgtcgttcctttctttctctcattgtttatcattatggtttttgtggttttctatagtgctaaggtttggttcttttttcccttagtgtatctgctctaccagagtgttatattaatactttttgtgtattttcatgagagtgattatcatcttttcacttccagatgtgggagtccgttgagcatttttcataaggtgatgaattccttctatttccccatgtctgggaaatactgtatttctcctgtatgtctgaaggatggttttgctgggtatagtaatcttggctgccaatttttttcttgcagtactttgaatattatctcattctctcctggtctgtaaggtttctgcagaggcagccatctagtttaaacttccacccagcacaggaagagaaagttttagaggtggtgtatgtaattctttaatgggatgcttcttgaccttggggatggatccaacatcccacttttattaatatatattcataatatcccctttaatacactgatttatggatgaaataacctattgacaatccctagaaaatacttatacatagccttaactgtaatataagggattaaattttttaggtaatttataatgaaataatatgtgttttaatacatgtctatttggggacaactatgttagaagatatacctaagaagtcaaatatttgttcctacttataagaaaaggtttaagacaagatcaaaagccattctctataagaagtactggaagggctgagtgcggtggctcacgcctgtaatcccagcactttgggaggctgaggcgggcggatcacctgaggttgggagttcgagaccagcctgaccaacatggagaaaccgtatctctactgaaaatacaaaattagccaggcgtggtggcacatgcctgtaatcccagctactcaggaggctgaggcaggagaatcgcttgaacctgggaggcagaggttgcagtgagccaagatcgtaccattgcactccagcctgggcaacaagagcgaaactccatctctcaaaaaaaaaaaaaaaaagacaagtagtactggaaaataaaagaacagatgagaaagataaataatagacttaagtatatgtgataacaaaaggagggaagtaacctaaataaagtatgaataatacacctgcaaaaataaattatagatggtcaaggtggagaaaaatgaggtagatcttaaaagcatagtatcagaatatatctcctgtcatgaaattctactataggccaaggctctaacatgtaaaaaagcctcggagaccataacatttgaaaggtggctgaaaataggaacataggtacaaaagtctacacagaagttgtatggtttagggacagtgtcagagtttttaatatttgattttaaatctattaaaagcaattcagaatcctttctgttacatactaatgtgcattattaaatgaaactcctttccatctatgtagttaaatatgctgctaggtatggtgggcacacatctgtagtcccagttatttggaggctgaggcaggagaattgctggagcccaagatttcaagcctgtagtgcactataactgcttctgtgaacagccactgcacttaagcatgggcaacatagtgataccctgtgtcttaaaaaaaaaaaaaatttataaaaaatgaaatgtgaccaggtacagtgactcacacctgtaatcccagcactttgggaggccgagacggttgggtcacttgaggtcaggagttcaagaccagcctggccaacatagtgaaaccccatctctactaaaaatacaaaattagccgggtgtggtagtgggcacctgtaatcccagctactcgggaggctgaggcaggagaatcacttgaacctgggaggcggaggttgtggtgagccaagattgctccactgcactccagcctgggagactccgcctcaaaaaaaaaaagaaaatgctataaaatattgagtagagggtggacatgatggctcatgcctgtaatcccaacactttgggaggccaaggtgggttgatcacttgaggccaggagttcaagaccagcctggccaacatggtaaaaccccatctttactaaaaatacaaaaattagttgggtgtggtggtgcacatctgtaatcacagctactctaaggcatgagaattgcttgaacccaggaggcggaggttgcattgagccaagattgtgccactgccatccagccagggtgacagagtgagactctgtctcaaaaaatatatatattgagtagagagaacatgcagagtgagttaattttaatttatgtgttgaacaccacagaataattttaactgtgtttttttataacgtttcctatattactggactttttacataactacttgtgaaaacaattcagtgttattaaatacaaaagcactaacaatttatattgggtatacttagtatacagggtttagtcaggtgggacatgagaaagttctttgtgtctgacagtgtcacacattacagaacagttagcgttcctgcccccttctaattaaaatatctagtagcattaccagtcattgagaccaacaataaatgcttcctagggaaaagtaatgatcttttaaaaaactggtgtttttatgatcacttttcacagctatctccagcagcaggtaaatgaggggcaagtattttatgtttatacttgtatctgtttttgtaagggtatgccctacaggacctgtaagttccagcattaataatatggaattcactaggatatttacatttcacaaagttttattaattctgtatttaaatcaagttttattgtagtttcgttattgtctttcaaactactaaaattaagctttttgtgtgttcttgtgtaagcttttattaatcataacaatgtgttattccggctaaagaatgctagatgaaactgcattttctcctttgggacttatattaacaaactatagtcttcaaacttttacacttaccagaatcacccggaagcttgttaaagcacatattgctgagcctgacccctagagtttcttttttgtttgttggttgcttttgggttttttgggtttttttttttttttggtttttttttttttggttttttttttttttgagatagggtctcgttctgtcacccgggcgagagtgtagtggcgcaatcttgagtcactgcaactttgctgcacagattcaagcaattctcctgcctcagtctcctgagtagctgggattacaggcatacgccaccacacttggctagtttttgtatttttagtagagatcaagattcaccatattggccaggctgatcttgaactcctgacctcaagtgagctgcccacctttgcctctcaaagtactgggataacagacatgagccaccacacctaacccagagtttctgaattagtaagatgatgtgtggggcctgaggatttatggttctaacaagttccctcatgatgctgatgcttgttggattggggaacacagtttgagatccactatactaacaaactgtttatgatttcattatgttttagggagcaatggaccacagaaattctgcattgaaaaagttgggaaagaaaattggctacccagaagtcatacctggtaagtacaatcagaatggatagagaaaacagcttttgtccagttatctgtagctatttaaagccagctagaaattaaaaatgatatttagtagatttacagaatagcacagccatcatagcaatccagtttaagagcattttgttcacccctgtatgattccttacaactatttgcaatcaattccttttttcacatctgaattttttttctaatgtgggatttagagttattttaacttttctctgagggcagcaaaagaaagttaggagacctactttctaacatcatgaccacaaatattctcatttgaaatctaattacatttctaaaaatgtagaaaactaaatctaatcctaatctgacagcaaatatattaatattttggaattcaacctaatgtcaacaatatttgaaccttattttgtgggatatattttagtggtcacatatggtccttcctggatatctgacctctttactgttttactaatgtctattcctttttgtttttatacataatgttttgtacatgcatgtagtgtttaagtaacaattttattgatatataatttacagattataaaactcaccttcttaaattatgcagttcggttcagtggggtttttttgtttgtttgtttgtttgtttgtttttgagacagggtctcactttgtagaccaggctggagtgcagtggtttgatctcagctcactgcaacctccgcctcccaggttcaagcaattctcttgcctcagcctcccaagcagctgggattacaggcgcccgtgaccacgcccagctaatttttgtatttttagtacagatggggtttcgccatgttggtcaggccggtctcaaactcctgatctcaggtgatccacccacctcggcctcccaaagtgttgggattacaggtgtgagctgccgcatctggcctgttcagtgattttagcatatttatgaggttatgtaagcatcattactgtctaattccagaattttttcaccctcccaaaaatccatgtacccattagcagtcactccctttttaccccgtgtagcccttggtaaccactaatctactttctgtctctatgaattttcctgttctggacatttcatataaaatgaatcatacgataaatatataacttttttttttttggagacagtctctctctgtcacccaggctggagtgcagtggcgtgatctcagctcattgcaacctctgcctcctgggttcaagtgattctcctgcctcagcctcccgagtagctgggactataggcagcatgcaccaccacgcatggctaatttttgtatttttagtagagacggggtttcaccatgttcgccaggctgttcttgaactcctgacctcgtgatccacccactttggcctcccaaagtcctgggattacaggcgtgagccactgcccccagccaaaatatacaaccttttgtgtgtagcttcttttacttagcatgttttcaaggttcatccatggtctagcatatacagtatttcattcctttttaaaattaattgttgggtttaatatacataacatagaatttaccatttttaagtgtgtacagttcagtggcattaagtgcattcatatcattatgcagtcatcaccatcacctatctccaaaaattgtttcttttgttgagacatgtctcagtctgtcacccaggctggagtgctgtagctcaatctccactcatgcaccctccacctcccgggctcaaactgtcctcctaccttagcctcccaagtagctgggacgacaggcatgtgctaccacacctggccaatttctaaactttttgtagagacagagtcttactttgttgctcaggctggtctcgacctcttgagctcaagcaatactcctgctttgacctcccaaagtgctggaattacaggccatcatgccagacctaaaacatttttcatcttgtaaaattgaaatggtacccattaaagcaggggtccccaactcctggtccccagcctgttaggaactgggctgcacagcaggaggtaagtggagggtgaatgagcattacctgctgagctccaccacttgtcagatcagcagaggcattagattctcataggagcaataactattgtgaactgtgcatgtgagggatctagattgtgcattccttacgagaatctaacctgaggtggaacagtttcatcctgaaaccatccccctctccactcctgtccatggaaaaattgtcttccacaaaaccattgcctggtgccaaaaaggctggagactgctgctttaaacaatgactccccatgactccctttccccaggtcctggcaaacatcattctactactgtttctatgattctttagtacttcgtaagtgtagaatcgtaccttatttgtcctttcctggctggcttatttcacttagaataatatctttaattttcatccatgttgtagcatgtgtcagcatttcctcctttttaatgctgaataatatttgatagtctggatatactacattttgtttatacattcatctgtccatggacacttagattatttccaccttttggctgtttatgctgctataaacataggtatactgtggtagaatatagatatatctgtccatggccctgctttcagttgttttgggtatatacccagaggtggaattccttgatcatgtagtaattctatttttaattttttgggggaatctcgccatactgttttccatagtgactacactgcgttatattcctacctgtagtgcagaggggctccaatttctccacatcctcacatccttttcaactcttgttttcttctgttttttttttttttttttttttttttggttgttgttgttgttgttttggtgttttaaataatagccatcccaacaggtgtgaagtggtatctcattgtggtttttatttgcatggtaaaggatgttgagcatttttttaatgtgcttattggtcatttgtatgtctttggagaaatctctatcctttgttcatttttaaatattgttgagttttaagttttttatatattttggataccagtcctttatcagatatatgatttacaaatattttttcccatttttgggttatttcactttcttgatggtatcctttgaagcacagtagtatatttttgtgcttctatagtagtgtataaagtagtatactacactactcatttgattctttgcatatttccttttctcaaactaacaattcttgcttttagttttaatcgcctggacctgccaccatacaagagctatgagcaactgaaggaaaagctgttgtttgccatagaagaaacagaaggatttggacaagagtaacttctgagaacttgcaccatgaatgggcaagaacttatttgcaatgtttgtccttctctgcctgttgcacatcttgtaaaattggacaatggctctttagagagttatctgagtgtaagtaaattaatgttctcatttagatttatctcccagtgatttctactcagcgtttccagaaatcaggtctgcaaatgactagtcagaaccttgcttaacatgagattttaacacaacaatgaaatttgccttgtcttattccactagtttattcctttaacaacaatattttatgtgtgtcaaaagtctcacttgggagtagtgtttttttcttttagacattctgcagacatgcagggaagtcctttggtaactgcaatatacaagattttcctattaagcctcttggtaagaggcatttgttaaaagtgcaagcttactcctgcttctggggatgtgagcaaaattcgggcttgtgttctccctctcattttagtctgacttgactattgtttttcctttctggcgcatgaatccatacatcattcctggaagtgaggcaagactcttgcatctctacaaagtagttttgtcaatttgaattcagggaaaagttggtcacagcctgcaaatgacttcatttggaagtctgattgtttcagttgcctgacaaatactacactttacaaacaatgttaacactgtgattccttcattgttttaagaagttaacctagggccgggcatggtggctcatacctgtaatcctagcactctgggaggccgaggcaggaggatccctttagcccaggagttaaagaccagcctgggcaacatagggagaccctgtcttttttttgggcagcgtggtgggggataaataaataaaaggaaaaaaaacttagcctagaattagaattaatttaattgaattcatctaaagatgtctctggtgatttttatatgttccgctatataattgatgctttatagttttatcataatccaacaacttcagttatatttaattattgttaaggagtttaagactagaaagactagagtgctttctagtccaaatagaggtcagtgaaacagcttttgacatcagattttcatttgagagggagagctgtggtactggctaaaaagaaaggaagataacatccagtaaccacaggaatatattctctgtgaattaaaagtcttcaaagttatcatttctctgacatatgttggagtagtcatttccattctttacattgtcatgaactggattgataaccctcatctgcaatattttcacccctaaaatttttaacagggtttcctttttttctcacgactatttaagtttagattgctccattattaactgattaatgcactttgaagttctctggaattaattattttaacttggcctagcttcgactgtcaaggtggctgttataaatttgacttcattggcagtggatgaagcctaagccagctgagtctctatcatagctgaaccctgaggacagcctcatagctcatgtatcagggacttttgccacatttcagaggcatagcatgaacaagtaatattaagccaagaataagcagcagaaccctgttccatatggaaaaaagaaaaacaattttttgtccctaatgttcttccttttacatcctggaacaacaataaaaacatttttttaaacttgtctactgtaagatactgccatcataaagcagagacttacatgagtgaaagggttgcctcatcaagcagctcagtgtaaatggggaggctaggctctccccagccctatggtttttttatttcatgtaccccaggaaatactgtgtggtttctaaaagccctggttgttaaaagtagggactctgcctttttgttggtagggagaaaaaacgctattgctttgtcttacagagcgaatgtctgccaactacccgttcattatataagtctgaacttggtaatatatggctaatgaagattaagccctctataaagacttcctgttgaggtgaattctcatactgaaatgtagttacctacaatatttactagagatttatgaaattaaattaagagataatgtaagaaaatacatttttttggttctatataatgcttcatgattcatttagggacctagaaatattgtgtgaaaatatataaatatcacccaaaaggctttctgccctatatttttaaaatacagaatagttatatttgaagtagccctggccctagttctatagggcttggctatttaatatttttatggaagaagtgtttagttctggaaaaggtaaatgcttgtatatatttttgcagcctgggatctccctactccattttttcctttaatttaagtggccacatgtatatgtcttccctgctgtgttaggaaaatgggggctggatatcccaagaatcagaggttatataaaaatactgcaaatagaccgcagacataaatatctaccaaatgctatcttaaattttggtccaaactgaacatatggaaatagatttattgtaagtatttacttagagctttttcttaaatctgaactaacttgcttttagaagtctttttctttgtaagcattgtaaatgctaataaatcctgttaatttttttttttttttttttttttttttactgcatgttacattgaaataaaaacaaagtaaaatgagcaattgccttattgttctgctcttttgcagggggtgggggttggggaagacagcattccacagcctggtcaggagggaaggacctcacttgtttcatcaaatggagtggtttaaaactgatcaagcagctcataataatgaattcctgctctgtcttttattatcttatgtcagagtgcagcaaaatctcatttcataagacttacaataactctatttaaaattcaggtattgtactcgggaggctgaggtgggaggatcccaggagttcaaatcctgcctgggcaacatagcaagaccctgtctcttaaaaaaacaaaaagacatattcaggtactgatttttcatcaagagattgacataccaatgatcagaaattttagtgaaacttgactcaactatacacaaagttctcatcctaaatgaactatttcagtcaagcccactctaccactttttacttatctggttaataatccgaaatgttaccggggttgactcacggaattaaatttttcctctatttttatatcctttcctgttgtggatgtaacttacctttctaaactcctttagagttaacgacttctatttagtattgttggtatctccagcccccctcctttttttgtttttcttttagttatttactttgtttgtataatttgctttcattaactaaaaatggaattggcagcactggattgtatattactgtattaagagtacctttgttttcttgatctgttacttttaatactcaggtaatgctacaaatattacagggagtcaaatgcttttataaagttccttcagtggttgcctcacttgcgttttcctacaagatgtaagactgtttataattaaacttttttggtccttcatttgcatgcttttctatcagtcttgggtaaggaggggtctctttcctctctccccggccccaccttctgagacttatatgtgaccaggtcacatagatttctgcctctctgcttttttaagtggcaagttacagcccatctggattgtggtattgttcccagaccaaatcaagggttggactgcttattctcgcagcccaataatgaggtgcagatgaactgagaaaggagggagtttatttctgtaaccaggtatggggagaaagcctggaaatgatcccaagaccaactcaaaactacaaagttttccagagcttatttacattataagctatatgtctacatgtgagtgtacattcatctaaagacataagtgattcacttttttaaatctataaataagatctgagccctgaagaccttcctctggagcctcagtaaatttacttaatctaaatgggtccaggtgctggggtgattacccttatcttgtttcctgctaaatcatggaggtttggggacttccttcagacccccagtaaacttgtttgtggaggccttcagaccccctcaataagttccttcagacccccaataaaacttgtttaatcctaaatgggttcctttgttatcttgtcatgcttcaaggcccagaaaaggcctgggcaaaacccttggtggccttttgttacattctagcctttgcataagggccctcactctttcagcttttaatatttaacttaaccactcagtgctgaaacagttgttatggaggcctgcgttattgagatctggcctgccacggtacgggtagaaaaaaactagaaagagctgttgcagatgagactggatttggtgcccatgttgaagatgaagatatctgcaggggccatcaaccaacataaaggcctccatatgaattgcttttctgagacaactaaaagaccgggaccacaggcatgagtgctgagtagagaaccaccaactagctagctgtcaagactgttaccaagactgttctcaacaagctgacctggttaccagcgtcagtagaactttgtcttattaggaagctcaggtgattatgctctcatttaaaacagaaccagtggagagagactaagggaagaggaattttttaatacggctgatctaacatggactagaggacaaaaactgcaggcccctcccaggtcctgagtagttagtagaccctatcctgtttattctgtccaatggaagctgctagaatgctctagtttcattgtggcttagaataaggggaaaaatatgccccgctaagtgagggtcaatggtcagtaagtaattgttcttactggccattggctctcatcccaaaccctacaaatcatcaaactgggactcagctgtgactgactggctgttctctggactttttaagtgtctgtctcacattatgtaactccagtacaggagctgctctctctcccagcccatttcagttgtcaattcttccatgttcataggactcctttgtgatcaggatatctggagtgaggagccaggggaatattcctggttggcaaggaaaagagggccttaaacataaatcccagaaggacactgttgatcacttatgcacaggggtctgttaataagcaaagagtggctatggacaagaggatttcctcaaagcaccccacagggaaggaccttgacaatttgtagtcatacttgaaagatcactaaaaacagccctcctgttatttttcttctaattcagacctgttgttctatttgtcttccatatcatagcaaccagtaccacacccatattcatttaataccaaaacaactgtcaacatttatcactatgtgcaggacactggtagatatgctatgtgcagtgtcacttagtcttcctgttattggtaatgattatctctgttttacaagaaaatagaggctcaaaatgattgaatcatgtccacaactattaagtagaaagaatacaggctggaatccaggatggtttgactctaaagcatgcatactttaccatttttgttgtactgctacttaccacaacactgggagtcgaatgtgaccaattttgccattccatttaattagtctccaaatcctatctatccccaaaactttttttttttgagatggagtcacgctctgtcgcccaggctggagtgcagtggcgcaatctcggctcgctgcaacctccacctcccgggttcaagtaattctgcctcagcctccctagtagctgggattacaggtgcccatcaccaatgcacggctaatttttgtatttttagtagagacggggtttccccacgttggccaggctggtctcgaactcctgacctcaggtgatccgcccgccttggcctcccaagtgtttggattacaggcatgagccaccgcgcctggccccaaaacttttaaaaatccgttctctcagagctgacaacattgccacagcccacgtgcttcctccctaatctggctgaccataacagcatcctgtcttcatttttccatcctcctcgctccagtatatcttctgtactacctcaggattatctgtggaagacctgtctcatgcctcctctacctaaaattttacagtggtttctccattaccgcagaataaaacttttttttcttttttttgagacggagtcttgttctgtcgcccaggctggagtgcagtggggcgatcttggctcactgcaaccgccgcctcctgggttcacgcgattctcctgcctcagcctcccgaatagctggggttacaggcgcacaccaccacccccggctaattttttgtgtatttttagtagaggggctttcactatgttggccagactggtctcgaactcctgacctcgtgatccgcccaccttggcctcccaaagtgctgagattacaggtgtgagccactgcgccgggccaaaactctaagcctgccactccgggacattcttggtcctattccagctcctccttcattctcattttggctcctgtcacatgaactattggccattctcttttttgcttctgggattgtaatctgttaaaatcctttcactcctctcagtctggttctccatgggcaagacagtggtgattcttccagtgcttatcttccaggatgttttagggtccagtctctgcagcacttcttccccttgctaaatgctttcctaatgtttccagcattcaatagaaattcctttggatccagtccttttaaaaatttattttgaaataattttacatttacagagctgttgcaaaaatggttaagagttcctgcacagtcttcacccagctttctccaatgttatgatcccatataaccatgctagaattaccaaaactaataaattaacactggtaaaaataacactaaactacagcccttactcagatttcaccaattttcccacccatgttatttttctttctccttactcctctaatctgtgacagttccgcattcattccttgctttcatgactttgagattttggggggcgggggcggggtacaggtatcttgtagaacatccctcacactggatttagtgaaattttctcatggtttaaggctgggagtttttgtggaaaatgactcggaggtgatgtgcccttaacgcatttttatcggggcacacggcatcaatatctccccttgccagtaatactaactttgatctggttacggtggtgtctgctaggtttcttcgcagtaaagtcaatcctcttaacatgcagacactcctggaaggagaaccaaatccttcctcactgaagagcagctactgtggaatgaaactttggagttagatcatcgttgaatccagcaagctacagtgcctgggagaaacagcatttataaagtatcgaggttaccgatacttccctgaagctaccggagataacgttatgtgcgtgttcagcacagtaatgtggcacagggttcactaaacggcagcatgttttaacagaagttatttactcctagaggacccagaaacgtttgcggcctgccggaacaggacaacatagggctctgggaagagtccccctttcagaggtgagaacaagacagaacacacagatgtgaagtgccttctgctaggtaacgcgaggcggggctgagctcggattctaaagactcccaggccagccctaaccaattcatctccgagcttgcacggcatcttacccggagactcgaggtacctgactccagccccaccccaggcctgcccgatcccgaagcgcattttggccctgggcctctctctggctcagtctgggcgcaaagcgggtctcagcaaccgtcccacttgccttcataccctcccaccacgctccactcagggactccagaaccagcttagacctccattgagagctgaaagcctcttccgataccgagaaccagcactgaaagcctcttccgataccgagaaccagcatggtttttgttttgttttgttttagtcagggtctcttgctctgtcgcccaggctggggtgcagtggcgcaatctcggctcactgcagcctcgaactcctggtcaggcgatcctcctacctcagcctctggagtaactggaactacacgagcgcgccaccacgcccggctaattttgtttattttttagtagagaaggggtctctccatgttgcccaggctggtctcgaactcttgggctcaagcaatccttccgactcggcctcccaaagtgctggaattacaggcgtaagccaccgcgtccagccagaaccagcatcttttctgcacggctggagttgggaattttccacagcttagcgcactgctccttagcttttcgctttgccacagtggaaagcagattttccaagaatcctggcggagccaagatcggctcgcccgcccccgcctcacgctggctcctgataggcagctagagctgtccgttttgacagaaacctttgcgcaggcgcagaaaggcacaggactcgctaagtgttcgctacgcggggctaccggatcggtcggaaatggtgagcgtgcgccggggtcttgtggctggcggccgcccaccaccccacgccaggccttcagtcttccgaggatgaggggatctcagagctccggacagggaatcggtggtggctgggcgtggccgggcccgggccccagccgacttgagggtggaacccggcggcggaggcctctaaagcctgaccgaggcggggccgccggatcccgctgccccttgaccggaagcgggagcccagcctcggccaggaagagatgatgggcgaggggtgggcggcggccctgcagcctagagttttggggccttggtgcgcgatggcaaccctggcaacgtttcccgggagctcagtttgtggcaggctctgccaagcactttatgtatcttgtatttcctccgcctcctcccagctctgtgaggtagatacaatctttagtcccattttgttatacatatctgttattcagcgccccgagaagccaagtgctttgccccaggaaatagtggagatggatttgaaccctagaagcttgacggccgccactctgtcggcgtggttctttctagccgctgggactgggtgccagagtcaggaacgggcggggtctgctcttggggatcccaaagcttgctttctaccttgcttgctgcagctgtgggttctcaacgccgttacaggttttgtgtttgtaatcctcacagcttgggcaaaatttgaaaaagtttcaaattttaagccatgtgaatatattactttttcaaaaatcttatttagaaatctagagcttgtaataaaaaaattgaaaaaagaaaccgtgtcatcacctagaggcaaccacttacagtagtcatatgacttctagtcttttttgcttgtttttggtttatacagtttagcccctattgaatgtgcaattgtgggttctgtgtttttcattattacaccacaatatctccacatcattacaaacatgtaataatgcttcaaatatgtataacttcatttttcacatcacttcttaagctgtaaaaaaaattgatatataatagttgtacacatttatgttgtagatatacatgtaatattttgatacatgcatatgatgtgtaatgatcaaatcaggctatatttattatagaatatccatcaccttaaacattcattatttctttttttttttttttttttgagatggagtgtgtctctgtcgctcaggctggagtgcagtggcaccatcttagttcactgccacctccgcctcccaggttcaagtgattctcccgcctcagcctcccgagtagctgggactacaggcgcccaccaccacgcccagctaattttttgtatttttagtagagacggggtttcaccgtgttagtccgcctcaacacggtggtctcgatctcctgacctcgtgatctgctcgcctcagcctcccaaagtgctgggattacaggcgtgagccaccacgcctggcccacattttctttatccatttacctattgatggacgctaattccataatttagctattatgaatagtgctgcaatatgaacatgaggatgtagggatgcctttgatgtactaatttccgttcctttgaataaatacccagtagtggtattgctgatttatggtaggttttttttttcgtttttgttgttgtttttgttttgttttgttttttcgatgcctttgtcgaaaatcagttggccgtaaataagtggatttatttctgggtcctctattctattccattggtctgtgttttataccaataccatgctcttttggttactatacctttctggtatattttgaaatcaggtagtgtgatacctcaagctttgttcttttcgtccaggcttcttttggcttttctgagtcttttgtggttccatacgaattttaggattgtttacaggtaatacttgcacacagtaaaaaaataaatgatgtaaaaggatctaagtgaaaaataaaattcccactctcctaacccccagtctcagtctctcctcctttagaaacaaccattgttagtttctttttttttttttcttgcaaacttgaccctcctgggctcaagtgatcctcctgccttaattccccaagtatctgggactactggtgcacgccaccacaccctgctaatttttttgtattttttttttgtagagttggggttttgccatgttgcccaggctggtcttgaactcctgggctcaagtgattcacccacgttggcctcccaaagtgttaggattacaggcgtgagccaccacacccagctgttagtttcttatgcatctatacaagcacttatatggcccccctttttcttacttaaactgtagctttctagaacctgtattatgctactccgtggttatactcataaaagcaatgcaaatttagatgcctagtttaactttttttttttttcttttgaaacagagtcttgccctttcgcccaggctggagtgcagtggtgtgatctgagctcactgcaacctctgcctcccgggttcgagtgattctcctgcctcagcctccggagtagctgggactgcaggagcatgccaccatgcctggctaatttttctatttttggtagagacagggttttttttctatttttagtagagacagggtttcaccatgttgaccaggctggtctcaaactcatgacctcaggtgatccgcccacctccgcctccaaaaatgctgggattatgggcgtaaaccaccatgtatgttaacaatttgaagcagtaccagaggatataatatagaaagtttatgtggtccccatcttactaccccgtggcaacttctgttggcagttgggtgtgtttccttccagatgtgtttggtgcataagcacatttatgtataagctgtttattagatgaaactggaatatatatatatttgtatatgttaactttactttaaggctgaagtggagagatcgcctgagcccaggaggtcaaggctacagtgagccgtgactgcaccactgcactccaccctgggtgagaaaaaaataagagaaaacagaagttgactttaagatatatatgtatatatcttattctgcaacttgttctgttcacttaaaaatatcacacatttttctgtgttattatatgcaggtccacttcattctttttaaggtctgtatcgtatcctagtcccatatgtacatttaggtggtgtatagtttttttattccagacactgctgcagtaactgttcttgtcttttttgcactcatgctagtggttatgtaggatagatttctacaagtggcacttttggcttgcatattttacattttaggtggaaactgacctttagaataatgatataaaaatcatctataattggccggacacaatggctgacgcatataatcccagcactttgggaggccaaggtgggcagatcacttgaggtcaggagttggagaccagcctgggcaacatggtgaaactctgtctctactaaaaatacgaaaagtagccggaagccgtgcatctgtaattccagctgctcaggaggctgaggcactagaatcgcttgaacccgggaggcgggggttgcagtgatccgagaccaggccagtgcactccagcctgggcaacagagcaagactctgtctcaaaataaataaataaaattaaaaaataatcacatataattctcctcgtccagtttcactgtgccacataactattttcatctttgtatgttctccttcctcttttgttcacatatgcatattttccaagataatgcatgctgagttttggggggatttttttctttttttgttgttttaatatccaaaaacatttaaccttgttgtcatatcatctttgtgattaactacttagtgactacataatactcggtgaaatagttgtaccataattggccaaatatcttacctgtgtacatttgggttgctcccatttctttttggtttgtttgttttagagatggagtctcactctgttgcccagactggagttcagtggctcaatctcagctcactgcaacctctgcctcccaggttcaagtgattttcctgcctcagcctcctgagtagctgggattaacaggtgtgcatcatgacgcccagctaatttttgtattttttagtagaaacagggtttcgccatgttggccaggctggtctcaaactcctgacctcaggtgatccgcctgcctcagcctcccaaagtgccaggattacaggcatgagccaccatacctggctgcttccatttcttaattagtagaaatagtgctgtgatgatgcttctgtgaatatcttgttttgtttcattttaacttacttattagattatttcctcaggataaaattcttaggaaaataatttctgaggtggaaggaccagtgcttttatggttcttgcaatatattgtcctgtagctttgtcaagattgtattgcccttgcacctgccagttttgtaataacaatgccagcatttaaaaataaacctcagcattgctataatttttcatttctgtcttttttttttgaaatggaatctcactctgttgcccaggctggagggcacgatctcagctcactacaaactctgcctcccaggttcaagcaattttcctgcctcagcctcctgagtagctgggattacaggcccatgccaccatgacggctaatttttgtatttttagtagagacagggtttccccatgttggccaggctggtctcaaactcctgacctcaagtgattcacccacctcagtttcccaaagtgctgagattacaggtgtgagcaccacgcccagctgaatttttcatttgtttgtgagggatgatgaccatggtttgatgtgattgtaatttctcgtaggcatattttctactagtattcttttgtgcactacctactagagacttgctattgttcttagtcattttgtgttttttttttatttattttgtctgttatatttgatgcaaatacttttctatcctgttagattagttattcttatacagaagttttatgtttagtggtcaaattggtcatagttctttgtcagtcatttgcttccagtggtcatccctcctatgctgagccaatggatcctcctggatctttattgctgcttgtttttccatgtgtcaggaatgtgcatctgggaactagagaattggggaaccttgtctccatcatcccattgcccagagtgcatttctttctcatcatttgattcttggcttaaagatgacatacttatggccgagaatggtggctcacgcctgtagtcccaacagtttgggaggccaaggcagtagatcacttgagcccaggagttcaagaccagcctgggcaacatgtcgaaaccccatctctacaaaaaattagctgggtttggcagtacacatcagtagtcccacgtgttcgggaggctgaagtgggaggatcacttgagcctgggaggtcaaggctgcagtgagccatgatcgaaccatggcacgcctgggtgacagagtgagaccctatctcaaaaaaaaaaaagattacatctcctcaggtgttcctgaccacattagccagagtagcatcccttgccccacagcctagtccctgtatcctgcaagaatcttgctcacttgtttaagtctctttcaccagaatgtgagctccctgagggcagggacctcctcagttgtggtcaccagtatattcagctcttctgttgacctgcagtgtgttcttgggcaaaacccttctcctttccaaacctgtttccccatcactaacatggagatcatactaacccatgaatgggagtttcagaagagagcatgtgtctgaaagcaatatatgacccatagtaggcgctgagtagggaaattatacctatgtgtcctcccattcctgatagatgtgtgagatgtgtgtttacttttcttttttctttctttcttttttctttttcttttttttttttttttttttttgatgagtcttacactctgttttccaggctggagtgcaatggcgcgatcatggctcactgcagcctcggcctcctgggctcaggcaatcctttcacctcagcctcccaactagctgggactgcaggcacacgacaccacgcatggttaattttttttatcttttgtagagacgaagcttcaccatgttgcccaggctggtctcaaactcctgggctcaagcagtctacctgctttggtcccccaaagtgctgggattacaggcatgagccactgtgcccagcccatgtttacttttaaacagccagatcttagtatctggttctcgttgagtttcagatcacctaaaccttagctctttttcacactgtggactgtgaggccatgtccccctcctgtacttaaaaaggttgatttcgtgaaacatagttgcagaaatgctttttatttgttccttcagtatttattgagcctatcctatgcgaggtactggggctataaagtctggtctggtttcctgattccagggtgccttgcgtctggaggaggagatgaacgtgacctaaacagttgcactgcattgtggtcagtgctgcgaaggctgggggcctcggtgcccagtagaggggctgatgtcagagaagcctcctgcgggctctggagctgagtccaaagggttgggaggtagttacatcaagcagtgagtgaaggagggaagcttgtttccttcagaccgagagcagcacctggcagggcaggggtaggaggcttccgcaggctgtgttcgccccctgctgtcccttctccccacagcagccagagccgtcctttggaagcatcaggtcttgtcactctttacctcaaaacttgacagtggctccatgaatcacgcccagtgaaaaccaaggtcaacacttgatctgccaggccgtctgtggtctggtcccggatcccagctgctgtccctcccctgctccctgcccttcagccacagtggcccctttgcttttccccctgaacataccggatgcttgcccaccccagggcttttgtgcttgctcttggtgctgtctggaacactccccagaaaccggcatggctaactccctcatttccttcagatgtctactcactattgccttggtgagccttctctgatgatgtatttcacattcccatcacccctgcattccaggtcccgtttccctgctgtagctgacatttatgttttacttctttttgcttatttaatgtcctttcccacaaatgtcagtttcgtgacatgggatttttgttatattttgttcactgcatcatcacaggcctagaacaatgtctggcatatggaaggttgccatgtagttactaaatgaatagcagtcttaagaaatttcatctttttcatttcagccccattctccaatctctgggggctgttttggatttagattctgacatctcggttttcactttctttcccctttctttctgggttgattgcagattgagctgtcttaaattgtcatccaagttattcttacatcttattctgacaacattgagtgtatcagagccttgtggcccctgtatcatagacttcttttggatgcatagatggggggttaaaatgtttttaaatagaaacaatacagtagaatgaaaaagggtgttttgaaaaaaagaaaataaaacctttctataattccttgcccttaatgtggctcttttttcataatctcctgtaaccttttgttttcatgtgattgcagtcaccaaagcactttatttttgcattttgctgttttcacttaacattatagcacacaccttttgtgatggtataacatggtctaatcaccatggttaatatgtgtattcctattagtggatgttccataatctacttggccttttccctaattgttaggcatttttagttctttctgcattctgctattgcaaatgtcactgtactttggtccatgatgaatttccaggagggcgagcagggtagaatgagtactgtccagtgagtactgtccagcagtgaccactattgtgccccactcctccctttcagaatagccgttggcatacagtaggagctcagtgagtgtgttgactgacattcgatctcatacacgcatgacccactgcattgtactctcacgtccacagagccctgtcattgtacccaggctccagatcttagaggcataagtccattttccacttttttttttgttttttttttttggaaatggagtcccagtcgcccatgctggagtgcagtggtgcgatctcggcttactgcaagctccaccccgcgggttcacgccattcttctgcctcagcctccccagtagctgggactacaggcgcccgccactacgcccggctaattttttttgtattttcaggagagacggagtttcaccgtgttagccaggatggtttctatctcctgacctcatgatccgcccatctcggcctcccaaagtgctgggattacaggcatgagccgccgcaccggccccatttgccactttataggaggagcttgtttacccttccctccagtgttcgagagtattctgtcacaggggagtgggtggcagtgactggattgtcagccttgtgccttccagaaaaacaagaattcattgtgctgtctccacccagtgttgaggatccccccccccatttcttttggtgaatggagcctctgtttctaacaactctcagcctttgaggggcttctgactggattctagaccagtctggaaggggccgcctgagaacaggtatacctcagggctagtttccatccacaggaagaattaagtctagttcagttaagcggtgtttatcacacttctactccacagacctttttagagtctctaagaaatggacatagtacctaatgcatgtcccagagaggcacacccagggatttggggagtcacacgtaggcagactccatcaactgggggatcagtaaaggcttcgcggaggagatgatgtcttagatggtcaagaggagtttgttggatttcagcagagaagaggccttgtgggataaaaagatgtagagatagggaggtgtgtcacggagctggagagtggagggaagggtaggacaggagtgacaggaggcctggcatggcagaatgaggacccgaactgcgactgcccctccacttacagatgccatatgcaagagtagcccaccagagcagtttctgggtaatcaagattaatgagccccttcccaaggcacacttcttacagctgagtgctgtgcatcacactatctcagatgcctgccgcagtcactgagtctatcctcatgtgctgtttgggccacaaatgacaaagtgttgtcttcctgttagatactactctctgagttttcttaaatcaacagagtcccatcccccagctatgccaaatatgtgagtcatggacatgtatatacatgggaatggtgtttatattctgctccccaacagctgaggagggtgggataatagtgcctggtgggcagagcgccaggagcagccctgtcctgcgtgggggtgtgagcggatgctctgggcactggtggtggccggaggagcacgtcagatcagcctggggaactttgagggtgtgccaggtgcctgagtattacttgtttgttgttggaagacaaacgtatgattcatctgcctggggtatgaggaagttaatcctgcctatcggcctctcctaaccttggtcttgttttctggcaggcagaggtggaggagacactgaagcgactgcagagccagaagggagtgcagggaatcatcgtcgtgaacacagaaggtacgccctccctcccgccatgacccgcacccaggcaggcccagaagcagccataacacagcatagcacttgctgttcactaagcccttcatgaatctgatctaattttaggcctttttaatttttaacacctccagtgttcttttttttttttttttttttttcattaaggctagtcaggtgaagcagcgggagtggagaagggacaaagaaatcggtaactggttgtgagcaattagttgtaaactgcattcagaccagccacctccagtgtcctcacaaagggaaaatccgctcaatcccaccaccctgacagatcacacttcagtcttccatgcttactcagcctcgtccagcacagttccagaggaccataatcatagttgttacccttgggcatatgtttacacttgagctttttaaaatattgcttcatggtttacataaacaaattaagtgccacgacaatgttcattagcccaattttgttgtttctactttttagtaaatccattaagtggatattacatccccatttgtgttgattctgctttattggctggatagttctctagttaactcctctgtgcctgcagctcccctccaccccaacaaccctttctgagtggtatctgtgtaggtagaagtgtacagatactaactttcccagactgcactggacaggaagggagctagcatttatcacatacccgctctgtgccaagattctggctggtgcagccctgtcgtctgcattttgcaatggagaaaactgagtctagaaatgtaattgatcggcctaccatcacacagtcgagatttaaatccaagcccgtctgagtgcgcttgggtgctttctcccgcgccaggctgtaaagaaccagaatggcccccagaccctcacgctccaggcagcagtaaggacagggactctggaatccagcagttgtgagtttgaattctgcctcatctcctgactagctttgtgaccttggccaagtcgcttaagcctgtaaatggggataatacttatatctaccttataagttgaagagtaactaagaatgaacagcgtaaagcatttagtacagtatcgtcaccatctgttttgagctgtgaggcatttgttcatacaaactctgatttacctgattgggttcccctgttgggttgggagcatccacatgcttcatgcctctaggccacagtgtttcccacacgtattcattctttgaaatcacccgggggtcctgttaaacatagctttccaggcctctgcaccaaaaagtctaatttattagagccaaagcaagacctgaggaatctgtgtgtttacgaagcaccccaggagattcttatgatcagacaggtttagaaaattctgctttaggggatagattctaatcagaagaggctgcagtgagagccacaggcctaagattcacagcagttctgtctccttccgaaggccttcccttggagagactgcctcagatcatgttttcagggctgtggtccttaaacccaggggtcctgtgctaccctgggagtagaggtagaggctggggttcctgtcctccacttcagtcagagcacacacactaagaaccatcagttcatgtttctacattggttttaatttggaaaggggtttggccaatttaaaaactaccctactggagtagccggccgggcgcggtggctcacgcctgtaatcccagcactttgggaggccgaggcgggcggatcacgaggtcaggagatcgagaccatcccggctaaaacggtgaaaccccgtctctactaaaaatacaaaaaattagccgggcgtagtggcgggcgcctgtagtcccagctacttgggaggctgaggcgggagaatggcgtgaacccgggaggcggagcttgcagtgagccgagatcccgccactgcactccagcctgggcgacagagcgagactccgtctcaaaaaaaaaaaaaaaaaaaaaaaaaaaaaaaaactaccctactggagtttacaaaaataacataaaccagtttatgtgagacttgggaggagaggagtccactgagacactgctgctgatagagcagcgtgaccagtgaaggaagaccaggaccatgcctgactcacctctgttcccgtgtcattcaccacaggccgcagagtcaggtcagtgaacgttaaatgaaccaaccacagtgggtgttgccatcagcccctttgatttggtaattcttgaggactgtgttgagaggaaataatcccaaaggaaaaaacctgaaatttttgcaagcatgttagatgccataatcagtagattaataattgttataatggctgggcgtggtgcatggttgctcacacctgttctcagcactttgggaggccatggcaggacgattgcttgagccaaggggttcaagaccagcctgggcaatgtagtgagaccccgaactccacacaaaaaaaagaaaaattaggcaggtgtggtggcacacgcctgtagtcttagctactcaggatgctaagacaggaggattccttgagcccgggagttcaagactgcagtttgcttcaaggcttcttgctcaaagctttgattgcactccagcacagagcaagaccttgtctctttaaaaaaaaaaaaacaaaaagtaacaatgaagtgtgtaggcccttcagtgcccagcccaggggctgctcccacaggccaggatttaccagcagccctgtgggtggaagtggtacagcagtgcctgtgtctgtcacatgtctggtgtgctgccaggcacggtttgtttatgtgtttcttggctgcctcgtagggtagacattattgcggccacctttacagacacacttggacatcccaagaggtcaggccatgcccggttgcggggccccccaaattctctagcccagtgtattcagtgggctctaatttgttcagtgctcttagagagcctcttatgtgtgtcttcagtctaggccttgttttggagaagcagagttctcagcaattcctacttaagcagaatgaaagccatcaagggcaacaaagtggaggtgctgtgtccttggatagaatgttgatttccagccaggcgtggtggctcacgcctgtaatctcagccctttgggaggccgaggcgggcgtatcacctgaggtcaggagttcgagaccagcctggccaacatggtgaaaccttgtctctactaaaaatacaaaaattagcctggtgtggtggcgggcacctgtaatcccagctattcgggaggctgaggcaggagaatcgcttgaaccaaggaggcagaggttgcaatgagccgagatcacaccactgcactccagcctggacgacaagaatgaaactcggtctcaaaaaaaaaaaaaaaatgttgatttccaagtcagcagagccctggcaagcacagagctagacagaacgtgctccccagccctgtctagttctgattaaaccatgtggtcatttcatttacaggaggctgggagcccttgggacactgtggagacaggagcaggccccctgctcagggctgcccctgatcagttgggtggcctgaggcaactcctttccccgcttcagccctcaactgcctcgagtcctgtgatggtccagggaatctcttttgggcacttcttgctctaagacctgaaagacttttgtcactaagagagaaactgtcttctgggactggacattttgactccaaggagacaaccccaggggccaacagccccagctgtgacccccaggcttccacatgaactcacaaaggagaggccctcattcttgccttaaaactgcccctaaagccaagccttttcactgggaagccctagctgcttaccttttggatactagtgagtgctgcttttttgtatactcatggggctgattgcaccatagctgagaacgtggaatgcagaatgagcccacctggctttgaatctgggccctacttaacttatcagctatgtggttttgggcataagccactttctctgttaagttttctcatttgtaaaatgtgggtcataattctgccttcctctaggggaagcttttagaatagtgcctggcatgaaatgcctatgaatgtctcagttagtgtgtgtgtgtctttaacttgcgtcccattctcagggcccccacatcagtgtctcgtttacatctcacacagtgaccctgcgaggcaagggtttgcccagtttgcagatgagaaacccaaagctgagagaggtgtggggaaccgcccaaggtcacccagctgtgaatgaacgtggtcagaacacagaatctgagttggtcacacttcccactgatccatggggcctttaagccctctggaagcttccattaaagatgattatttgaggataattgtattgggatgcctatgatcttatctagggttttcctacccatccccaacattcagctcagctgcctctttcttgaggacaccctcactgatcaccccagcccagccagagtggttgctcctgctcctgcccctgaacctatgacatacccaagtcccaatactttcgagccatctgccactgccttttgacatctctgccttggctagattcaaatggtgtttcataataaaagtctgagtttaagcagctttaccgaaaacgcaagggaagtttcattccatttatacttctccagaccccctgccatcctctgctgctacccacacaggcagaataaaaggcttaaatgtgtaagtcccatgaaggcaaagattggtctcttgtgttcactgctgtctgtagtacttaggatggtgttggcccagagttggtgtttgattaaagtatctgttgaattttttagatgttttttatcacttgaagggactgggtgtggtggaagggcctgggggtgtatcccagtagatcagagccccaagttagaaatcgtgcctcccagataaccagctacttctgcaggctacacagtgttcatttgtgaagacagaggcagggagcaggtggcctaataactaggccgtctcaggtctcctccagctccagcatccagtgaatctggaattaacctttgtccttgttttaatttcttcccggttttggtccttggccctgtacttccacgttttcttttgtttttggagtgagccagtagatgtttagtttcttgtctgttttacacagctcccgcttatatggatgtgatcagactcctcatgccaatatctttccaaactagtaaaagtagaccctttgaccactcacttaccaatagcaataaaagcttaatgctgtctctctagggacactagtgagcaaatcagacttggtcaagcccttggggagcttacattgtggtgggagatggaataatgatcactttgtaatggtgcagtgtcaacctggaaaaactgcgtggtgctgggatggtgccagtggggatgggaagtgtcacccgaagatggagacctcagggaccaaagtggaaatcatgagtgaataggggaaggaaagaaagttccaggcagagggatctgtgagaaggtggcttcgtggtgtgtaaaaagagaaggttaggggttctgatcacccaaaccatgccaagtcttgggactgtgggcctcttaccattggggcccaaaggtgagctaaggggcgggttcccggccaggtagcaagaacagccaacccagggctctacctgggctctggtcctggccctcggtgggtgggctgtgttttagcaaggcccttgcgggtttaagcaatagtcacatcccttcagatgaatggaaatggcatttactgtgtgagtggtgtttattaacatttattaagtgtactcttgctaaacattcttaaatgaattaagcagtattcagcccgcccagcagcactttgaagcacagatattatttaacagataaggcagtggaagctcaggaggtttcatcacttgcccaaggctgcatagctgtgaagggcagagctgggtgtaagcctaggtcaatttggagcccaggaccctattaatctggtccatagctgcccagcctaggacacgactaaaggcattcatcagactgacttgctgggtggcaagaaactggcccagtcttgttttcttaggcccccaggaatgcgagggtgggcagaaagagtcgtggtggctcctaccccatcgccgccccatcgtggttagattataatggacgcattcattactgccatcctcaggaagcttcaactgtagagcaaggctttgcggggccctgccatgcacattgtggccatccaggagccagcagcaaccctggtgatctggtcatcttgtctcttacagacaagtgatgactgcaacctgttctcctgacttgacttggctcaaaaagcctctgcgactcacctgcttcttttgccaccatgtcctcttctgcccaccctcacattcctggtgccctaggatgacaagattgagccagtttctttaccactcagccagtcggcctgataactgcctttggccgatccctagactgagcagctgtgggcaggatgagcagggtcctgggccccaaagctggccacttctatgtgaggagctacttgtgccacattcctcaagtgcctgtcagctggcgggctcttggggtcccatggatggagtcttctgctcatatgtcacaggcaattcacaggcacctgctggcccaatcatgacctgcggtggctcagtgtgagccgcatgcctcacctctgtgacagtaggcaccgtccagtgaataagtccacttaatggttcatctcaaggaaacagtcctcaaacaaaaggcttggtatacggtgatgttcactgcccagttaattatactggtaacaaacccagcccctaagtagccaacagtaggggctggggaggtctgtggaccgctcacctagtgggctctttgaaagagatagcagtgctgtttacaaagggtcaacatgttccatgtttctgtgcctgttgtacaaacatagaaacatgctttaacttggcacggccatgtggacagtgtgtttatagctgctacccaagcctcccttgggtggaaatcatgatggttatgtcccagcacaagctgactttttctcttctactttttagtgtgtagaagtttgtggccgggcgcggtggctcacgcctgtaatcccagcactttggaaggccgaggcgggtggatcatgaggtcaggagttcaagactagcctggccagtatggtgaaaccccgtctcttctaaaaatacaaaaatcagccaggtgtggtggtgcgcgtctgtagttccagctacacaggaggctgaggcaggagaatcacttgaacctgggaggcggaggttgcaatgagccgaggttgcaccattgcactccagcctgggcgacacagcaagactccatctcaaaaaataaaataaaataaataaaagaagtttgtaaggcagggtgcgatggctcacgtctgtaatcccagcactttgggaggccgaggtgggcggatcacctgaggtcaggagttcaagaccagcctggcaaacatggtgaaaccttgtctctactaaaaatacaaaaattagctagctgggtgctgtggcacgcgcctgtaatcccagatacttgggaaactgaggcaggagaatcacttgaacccgggaggcagaggttgcagtgagccactgcactccagcctgggcaacagagcaagactccgtctcaaaaaaaagaaatttgtaaaagcgcttcctggtttcaattctaagcactatgaatgagagtctctctttttttggacaaaaaaataaaaacctgattttgttagttttttaaatctgtgtccctgcatgaatcagagctagtctctccttttactgctgggaaccaatcagccctgggaaaggaacccaggagtgagccagcaggcctgcatgtgaatcctggccccactgtgtgactacagacaggtcgcctcatcactcagagctcctgttgcctcatgggcgaatgagatggtgttgccacccacagagtagttctagggcatggcactggcatgcttcgggtgctcagcaccatgcctgtcacatagcaagccctctgcggatggtggcattgactgagaactgctattccagttctccccaattaggggtgtgggtgggagctcggcagaaggggctccacatcctctcagtctccgtctgctctcccctcaggcattcccatcaagagcaccatggacaaccccaccaccacccagtatgccagcctcatgcacagcttcatcctgaaggcacggagcaccgtgcgtgacatcgacccccagaacgatctcaccttccttcgaattcgctccaagaaaaatgaaattatggttgcaccaggtaaggggtcttctacctccccatgtaggaacagacctcatggcacattctctgtggctcatcaggagtcctggcacagtggtgtctccagaggatccaagcagggcccgaggagttgaaggaattgggttgttgcctcactgcctagccagcctccagctggtgtcccatagcagatcctcccagggaccggccccagagggtaaccccagtctcctgagatagacagacacgtgagcatcatgtgtgtctccccttccttgataggagaaaactcaaaggcatttgggacatagaggagggtgtggccaggcctgtctggggctgtctgcaaaagcttcccagaagaggggacactggagctgaatcttaagggcaccaggaagcagtgtgagcaaggcggaggggcggaaagccacgtttggaagaatattcagtgattcttctccaaaatgtaaagcaaaagtactgtatcattttatccttgaaaacatgttctctgcccacttgtaaaggccaggcctgtctttaggccccttacagccagcttttcctgccgcacgggagcagattgctttgtttcctttacgcgaggtgcttgccttgcatttgggggctctgtggtgcaaccaaggcctgtgtttagtccttaggatcattctcagggtgaggagatgctcattctgggaggagcccacaaggatgggagcacaggagcgagcaacagagccacatctcctgcccggctccctcgctctcactcatggactggggtggcaggcagagcctccagggccgtctttgcattattacttttttctcactctgctttttcttggctgagccacatagttgagtgtgcgtgcgtcacgtatgcgcgtgatggtgcactcccgctgcagtgccgcttatctagggcatcaggatgtgagtggggaggagtgggaggtgaggctttggtccagtttagaaggggccacaaacacctaactcagttgcatggacttgatcttgcaagcagaggtttttagggcaggaggtgataggattatgattaggacctggataaaggaaggcagtggggggtctggggacactgaatgctctggactggcaacacagagggcaaggaggctggccacagagttctgaggtaatttgatgggaggtcagccactccctgcagcagaccagcataggttctgtcaccaggcctggaaggatgggcaggaaagaactatagagccagtcacagcagcccacaggctccctgggacactccctagaggggtggggacagagcagttcagtcacagagaagaacataagaataactccagagtctattattccaaaatcacgcttctgtgtgtaatgcctgatccatcggggagaaaagactgcaggaggcacagaatctgttttcccagctttgcttcccacaagcatgaccctgggcaagtcgcagaacacctgcaaatccacatctgtaaagtgtcgagtaggggactgtgctgtgctgatgtcctgagccaccctgcctggttgagtgtgttgacctgggttgggggaaaaagccttggaatcagatttaaactgcagttcctcccaggttgtcatgttgtgtgactgcagaggacaaagcttcactccccaaaagtcgggccgggatggagcgcagtggctcacgcctgtaatcccagcactttgggaggccaaggcaggcggatcacaaggtcaggagttcaagaccagcctgaccaacatggtgaaaccccgtctctactaaaaataaaaaaattagctgggcatggtggcgcacacctgtaatcccaggtacttgggacgctgaggcaggagaatcacttgaacccaggaggcggagcttgcagtgagctgagatcgcgccactgcactccagcctgggaaacagagtgagactctgtctcaaaaaaaaaaaaaaaaaaaaagttgggccgggaacagtccccctgctcaccctgtgcacagcagaccttgtgctccccagtggcccactgggagttcagggtatgggggaagggagcaaattacttggtctccaaatcagacaaattctccacagacagtgtcccttggcataaagctcctgagaatgtctcctctggaaggacagtgtcatctgaaagctcctggccattcaggtctcaacttggcagcggcagcgtctccaatttggccctgaagacccacaggcattcagagcccatgactgtggttggtgcttgagtccagaatgggcagctcccaagtagggggttctccttggggttcacaggcctggagatcccacaaccttgtcagtggaggaggatgaggtggccagtccctcaccttggcagcactgcagggggcgcccgtgctctcaagtcacactgtctctctcccacacacatgcggcgctgtgctggaggacggtggcgcgctgagcttgtcttacagagcatgcttctttggctcagcctcactgctgccactcaagtccttcctcgtcaccaaatgcttacctgcatttttaaggccatctactccacttgagagtaagttctatgagggcaggggcttgtaagcacatagtaagcatctagcaaatatccattgattaaataaatgaatgactctgtaaacctccctccactgctgacaccccactgatatgggtcagaagtggggtcagcagtggggacggggtcagggatgtctgtggggcatagttttaggatgaaaaccagtgatttgacactttgacatacccacttttatgtggccaagaaaaaataattgggttttggtgccagaactcctgtggtcaggagccaccacgcagagcctaggaggccctggcgctgaattgcctcaggatggctacagaacacaggacccaggggtggccacaggcgtagagcaggcctggctgctgctggaagtgcccgtttgagactgtagttagcaccctacacatcgtgggcagcctggagcagcctggcccgggagggagatccatgccttcccacctgcctgacctgaccccatccagctgaggtactgcttcccaggctgcagacagcagcaggtgttccagacagtgtggctctccacatgtgtgccacattcaccccaccctggcccagaaccgcccacgtgaacaggcttttttttttttttttttttgagacagggtctagctctgttgcccaggctggagtgcagtggtgcgatcatggctctctgcagcctcagcctccctagtatactgctgggaccacaggcatgtgtcgccacacccagcatttttttttttttttttttttttggtagagacagggtttcactatgttgcccaggctggtgtcaaactcctaggctcaagcgattctcccacctcagcctcccaaagtgctgggattatatgcgtgagccaccatgcccggccaagacattttaacacaaacttttgttagctggacatggtggcaccagtattcccagctactcgggaggctgaggcaggaggatcgcttgagcctgggcagttgaggctgcagtgagccatgatcacgccactgcactccagcctgggcaacagcgagacccagtctcaaaaaacaaaacaaaaaaaacagacttctagttttcacttattaacttcactagtattaaagctgaggtaactaactcagcctacacaaccttcaacacacactacctctcacaaagcacctgaagtggtattgttgcatttagggcttgatgatttggagtaaaagacactgatgttaccgattgtgcctatttttatcagtggcttgttaattatttctgttttcattagtgatttttatgtatgcagattggttagccatgaaactgttagtcacttcatttctgtttcttccctgttgcaacagcccatcttcgtgggaagaaccaagctttaggcttggctctgaacagccacaaagtgacttggctgaggtcctgccatttcgctcatgctcagcagggggcagcagaccagggcagttcagagtatggggtcaaacccaggtccctgtccccactccacctgtggatttaccctggattgggcaagccctttaactctctgaggctccgtgttctcagagtgactcgaggattcactgaggtgccgtgtgagaagtgggtggcccagacctggacacaaagaagccttgatcaatgtttgcagtttgattaagtgggtaaatctgcatatataaaaatcactaatgaaaacaaataattaacaagccactgataaaaataggcacaatcggtaacatcagtgtcttttactccaaatcatcaagccctaaatgcaacaataccacttctccagttacctcttcagtgaaacgggaggcactcaggctcacctccaaggacttggacttgctgtgatttaatggtggacattcctccttacagggccagatccctggagctggaatccaggctgctttgtcccattttgaaattttcttattcagaaggttctggaaagccaacaaattgagtttgtgacagaaattgacattaactggctgggtgtggttgctcacacctataatcccaacactttgggaggctgagacaggaggatcactcgagcccaggagtttgcaaccagcttgggcaacatagtgagaccccatctgtacaaaactttttttttttcttaatggagtctcactttatcacccaggctggagtgcagtgaggcgatctgcaacttctgcctcccaagttcaggcagatctcctgcctcagcctcccaagtagctgggattacaggcacctgccaccaagcctggctaatttttgtatttttagtagagatggggtttcaccatgttggccaggctggtcttgaattcctgacctcaagtgatctgcccaccttggcctcccaaagtgctacgtgagccaccacgcctgaccttctacaaaaaactttttaaaaatttacccaggtttggtggggtgtgcctgtagtcccagctacatgggaggctgaggcgggaggatcacctgagcccaggaggtcaaggctgcagcgagtcatgatcgcaccactgtactcagcctgggtgacagagctcttgctctgtctcgcggaggggaaaaaaagagagagagaaaaaagaaaatgacattacccaagtccagtgaagtatgtcggaattccatctttgacactaagtagctgggtaaccttaagccagtggtcctcccacagcctacaacatcagcatcacctgggaacttgttagagaaatgcaaactcttgggctttgccccagccccactaaatgatggttctgggcgtagagccctccaggtggttgggatgcctgctagcttgacaaccatggccttaggcaattcattggagctctttgaactggagtccccccacctggaaaacaggggtgagaatcctgcctacctgctgccactgtcgtggggaggattagaagagacgacacactgtagagtgcccgctgcccggtatggggaggcccctcttgcaggagcccctgcaggaatcttaaaggtttatcttccgttttcccagcatttggagatgctgaacgttgatgctttttgttgctttctccccttcctcattttatggttagtgatttaatggtttatttgctttcttgtgtgtttttctctcattttacatttagtgattttttttcatttttctcttttgcagataaagactatttcctgattgtgattcagaatccaaccgaataagccactctcttggctccctgtgtcattccttaatttaatgccccccaagaatgttaatgtcaatcatgtcagtggactagcacatggcagtcgcttggaacccactcacaccaatccagtgaccgtgtgtgggctggcggctcttctcccccaccaacggaacccctgtgtgcaccaaccttccccagagctccggagcgccctctcctcacttccaggttttggagcaagagcttgcaggaagcccgcacccagcttccttctgaccttcagttcactttgtcgcccttggagaaagctgtttttctttaactaaaaataaccaaaatgcttacccgtctgttgtgtctttaaacactaggttgaaaaggcctcactcttcctgtgtaatcacacgtcggaggcccggttgcctcctccagccctggtgggagatgatgttcatggtgtccgagaggcctgctgcttcttgtgcctgtggccatacttagtgtagcttggtgtataattggtgctctggtttctgggcctcttggccctagtccttcttttactgtttcccactgctgccagtgttgaaagattttttctactatgctgcactggggaagagagtggtacttactgaggacccggaatgcacctggcgtgtaacatacagtagctctcacctcacggtaccatctgtagacagagtgttagggccacctcagacatggggacttgggtttagaatggcttacctacgccctcacagccaggacacaggtctcagactcaaatagccttgctcttcccacactatctgccccagaaatcctggagggcccccgttcacccaagtgagcctgtcctgggcaaacatctgccccgcagacttggagcgcaggggtcctctcgccgagtgcttcccagaattcacctgcactcagactcccacccacccctcatccagccacactcttgtttttttccctctgaaaccacatgtatttaattttattagggtttttctttttatcttttgtttcctgttacacaggaaaaagactcggcaccgtgtagtgtgagcctggaaatccccgtccttgtcctccctgccccagaagtcaccactgtctgtgagttcttccatctagcaatcataattgcccagattttccagtgaggcttcctcaatgctatcggaggagtgaaatacatactctttggagttgaggggtgtagtttataagggcgtggcaaaatttcttcaaaagctactttaatgaaagataataggcattttccactctataatatattcgtgattatcttaatataaaaataaccctctcaaatagttttccctgaatcttcaagtaacgttggttgtctgagaaacactctggtttcccctgtccctgcggacctaggaagcgccccctgagagtgggtgactgcagaccccacgtggtgattctctgctaagttccgtgctgcagacgaacgtggggtgtggccagcagcgtcacccttgtgttctcggaagctgggatccaagtctgaggctcctccgtccttctgcttgaatttctccaagaaggataatggggaaggaggtcggaggaggagaggtcaggtttctaggacggcgatcgggggtctgtccctggagggaggaggcgttctggctccaaagcaagggttcagaatagggctgagggcctgtcccttccaccttcccttagtccccctagtactgcctcttgtttgccttaaagttccccatcctaaaagcattccatcaaagtcttggggaaagtttcttatgaaaataaagatgctccacttcccagtcccttgagcaccaggattttgtacatcaggagcccaccatgtacatcaggagtttgtaatgcagcaaggcaagcataattccttggactcaagatgtaaaaatctggctgggtgcggtggctcctgcctgtaatcccagcactttgggaggtcagggcaggattgcttgagcccaggagttcaagaacagcctgttgcgacatggcaaaaccttgtctccaccaaaaatatgaaaattagctgggcgtggtggcacgcacctgtagtcccagctgctggggaagctgaggtgggaggattgcttgaggttgatgctgcagcgagctatgcgtccaccactgcactccagcctgggtgacaaagtgagaccttgtctcaaaaaagatgtaaaaattcatggccacagagaaggtttacagcgggggaaaaagaggttaaaattaagttttgttttttgttttttttttgagacagagtctctctctgtcactcaggctggagtgcagtggcgcgattttggctcactgcaaccgccacctcccaggttcaagtgattctcctgcgtcagcctcccaagtagctgggactataagcgcccaccaccatgcctgagctagtttttgtatttttttgtagagatggggtttcaccatgttggccaggctggtctcaaactcctggcctcaggtgatccgcctgccttggcctcccaaagtgctgggattacaggcgtgagccaccatgcttggccaaaattcagatttttaagaatctaaataatggtattccacatacaaaaaccctagtgtttctgtactcaaaagtagcgtgtatactgtcaaggttagaaactgacagctgtcctaggcctagagggaaaagcatgggttctgagtttcagaaggacatttgccaatatagcaaaggtgtgcccacacccagtatttttttatgaaaaatttcaaacctacagagaattgaaataattgtatatcttccatctcaattctacagttacccattttgctatatttctgtatcacataactttccattcttccatctaacttattttttatggctttctaagtatattgcaggcagtacccaccccaagcactgccaagtgtgtatcattaactagtttgtttactgcttttggaggatgggtaagatttacatagagtaaaatgcacagatcttcaaagtgacaaatgtgacccctgtgtaacctcacagccgtttcaggaaagctgctgctgcttcccagtcggcccagcccactccccagaggccaccctgttctgatttcctccaagtatgatttctgccctctaaggtacagctctcacctgggctccgtgagcagggccggcgtttcagggaagtggcagcttctcgggaggtgccgcagctgccatctcccgtcagcactcatgcctccgcctcagccctggccacggctccctggaattctgatcctcctctgtgagctggtattgctgtttctccaaaaattaaaaatgctcaaaggattataggttttctcctctttcgtatgtttggctctgagacactgcatgttggcacgtttttcattgagaatcctgaaagccacctttccataccaaattcccatctgtctctaccaaattaccagaaaaagaaaaaatgagaaatggaggtctcagattccgtcatcacagcaggtagaaatcaaagtcactgaatccatcaaattagtaagcataccccactgtcagtgaacttcagctgatcagttatgtattgagaaggcaaataacacaattgcagaacatgttcaaaatactagtcctactgctatggtgaacaagctcaatccaatcaaaagcacctttattttggtctctcactgtctaaatttactctctagggcttgttctcccgctgtccctaggtgagatgtagagcaagccctgccctgggcagatgaagtccccgcccaacacaggaactactccttccagccgcgtttggagagaggccgccccttccactgtgggcccgcggggaacctcgctctctgcagggggagagcagcttatgtttggcctcggccttattttatttgcccacttggtgctgtcagctctctttcccaagttgctgagaggggcatgaggtggggagcagaaattcatcgttcgccgatactgctgtgaactggcttcggccgtggtgcattttcatgcgctttgacacgcatgccccctgccctcttctgttggtagctccctcactttgaagggtgcgctccttctggccggccctatctttggctcctggctgtcggggtctcccctctacacactctcttctgttgagtcgtggtgaagcagaaaccccaccgccttcctccatgggttacgataagattcatagcctctcggtggcctctaaaaatcttcctcgaacttccagctcctttatagaccacattcccagcagaagtgtgagctcgcttgggaccacctggtgtcacagtccaggctgctgctggtcctgctcctctacgtggcaatcggcccagagaatatgccttggggggtctcagcagaaactaagatgaaggtaattcaacttcaactccctagttcacaagaaatacgttagctgttttccctaaaaaaggctaggtgaaatagggaatttcatgattttttgtggggggcagggggggtacacaatctccctcttttcacccaggctggagtgcagtgagtggcctgatctcagctcactgcaacctctgcctcccaggttcaagcaattctgcctcagcctcccaaggagctgggattgcaggtgtgcgccaccacacctgggtaatttttctgtatttttagtagagacagggtttcaccatgttgctaaagctgggatccaactcctgggctcaagcaattctcccacctcagcctcccaaactgctgggattacaggtgcaagccaccacgcctggcatatttgatttttaaatactacaagtatttgggtaaaaattaaatttaaaaagtttgcaataacctaacaacaggctataatatgataagccaggggcttcccagcccttttctaatgaagtaactgaagaatgaggagcgttatctagaagtcagggcgaatctgccagagtcaaccaaagacagccccctgcaaacatgaacctgctctctagaaatgtacacaggtttgcgtcccggtggctccggggagaatgtggagccgagtggagtcaggagcgcaggcagccaggggagaactgatggtggcttgggcaagggcggtttcatggggtcggaaggggggattctgaagggagaacgccaggacttgctggggagggttggaaagtaaggaaatgagacatcaaaggagactcctccatgcctgcttgggcaaccaggtgctgccatttactgagaggaggctgactggggacctttgtggggaaagagcaccagcaatttggaaatggcttaatctgagcctgtgagatacccatgtgtttagaaagaatgtcggatggactgttgaatacccaactctgccaggccttgctagacataaggatatggagctatcagcctgttactggtatttaaagccaagaaggttaggtgcagtggctcatgcctgtaatcccagcactttgagaggccaaggcgggagattctcttgagcccaggagttcgagaccagcctgggtaacgtggtgaaaccccatttctactaaaaatacaaaagacagccgggtgcgatggtgagtacctgtagtcccagctacttgggaggctgagatgagaggattgcttgagcctggcaggtcaaggctgcattgcgccactgcactccagcctggccaacagagtgagaccgtgtctccaaaaaaaaaggttgtggaggctgggcatggtggctcacgcctgtaatcccagcattttgggaggccgaggcgggcagatcacctgaggtcaggagttcgagatcagcctgaccaacatggagaaaccccatgtctactaaaaatacaaaagtagccaggcgtggtgcacatgcctgtaatcccaactactcgggaagctgaggcaggagaatcgcttgaacctgggagatggaggttgctgtgagtcaagatcgtgccattgcactccagcctgggcaacaagagcgaaactccgtctcaaaacaaaacaaaaaaagcttctggagccccagttatcacgttcaagttccagatggcagctgatggaggatggggatggcaaaggatgtaccttttccctttaaggcaatttcccaggagtcccatagggcacttcctacttaggcctaattaactgaagttcagccacctgccactcctgactgcatggaagccaggtgcaaggagaaaggattttgaggaggggtgagtcaccagaacacatttgtttgctgcggagagatcgtaaggggcctcggagcaagtccatggggcgtgaggagggctggcgtcctgcgcacagtggaaggactggccttaggaacagggacagtgattccactcagcatagccagggagcggcccagatggcagggcaaggtctctgtggagtgagggcagcagggaaggtgcctcgcaggagaggagagaaaacatacacttccctggggacgcgggcggggagtttgacgggttcggcaggtggcccttttgcagcatctttttcagccgggggtgcagcagtcaccatacagctgaactcggccaggttaaggcggcagaagaaagagggagttgggacttttggaagtaattatgatggctgtggagtctgtgctgggtgaggaagggaagtgactggatagagggtggcagtggaattttttttttaattaaaatttttttcttccccaaccgctccccaccttttttttttttttttttttttaaatagagacagggtctggttatgttgctgatatggtctggctctgccccacccaaaatctcatcttgaattataatccccataatccccaggtgtcaagggagagcccaggtggaggtgattgaatcatgggggcggttcccccatgctcttcccgtgatagttctcacaagagctgatggtttggtaggtcctcctgcgttcattctctctcctgtcgcctagcgaagaaggtgcctgcttccccgtcaccttcctccaggattgtgagtttcctgaggcctccccagccatgcagaactgtgcctcagttaaacctcttttctttgtaaattactcaggctcgggcagttcttcacagcagtgtgagaatggacaaatagtttcccaggctggtcttgagctcctgcggcctccctaaacgctgggattgcaggtgtgagccaccgcacctggccagaatgaaactttggaaggggctgattgttcagataggcgggggtcagtgtgctcggccttgcttctgcaggggaggcacactggtgaggtgccctctagggcagacgagggaggggggttcccggagcagtgacggtggagacaggtgggacgacacagatgggcttgagaggactcaggactgcaatggcaggtgagggggagtccacctgggcctggaccaggtgatgggatgagaagggagggggcgattagctagaggcacaggcttggggaaagagatgacttcctttggacgtgttgagttcggaggcagcctttgttccagagacagagcctggacctgacagctggaagccaaactggaggtggggattgtacgtcactcatagtggaggcactggtgggtgtggagagaacccaggaccccatgagtggctggaggctgcgaaggccgcggggagccaacctccccaggtgaccagaccgctccaagggcttgaggtcacggagggagaagggtggcagccccggccctctcactcagggaggtggagttagagctggagaggcctgagcacgcccctggctcaagaggaggacagatatgcgggtgaggcccggaggaagggaatggccaggtctgaggccctgcatgggctgtggggttggtgttctcagcctccacttttccagtgaaagcagaggatctgtggggagcaaggtggggcagtgtgagctcgaggccggaggacccctgagtgggtctcagtccctacaatctttggagtgttccccttcgctgccttttttttttttttttaaagatggagtcttgctcttgtctcccaggctggagtgcaatggcacaatctcgactcactaaaacctccgcctcccgggttcaagcaattctcctgcctcagtctcccgagtagctgagactacaggcgcccgccaccatgcccagctaatttttgtgtttttagtagatacagggtttcaccatgttggccaagctggtcttgaactcctgacctcaggtgatccacccacctcggcctcccgaagtgctgggattacaggtgtgagccaccatgcccggccccactttgcttttttggttgtggttttttggttttgtttttgttttgatagtctctatcacccaggctagagggcagtggtgcaatcttggctcactgcaacctccgcctcccgggttcaagtgattcttctgcctcagcttcccaagtagctgggattgcaggcatgcaccatcatgcctggctaatttttgtatttttagtagagaaggggtttcgccgtgttggccaggctggtctagaactcttgacctcaggtgatcagaccaccttggcctcccaaagtgctgggattacaggcacgagccaccatggtcagccttcactttgagtctgtaaacgggaactgccaatccttcctcggagataatgaccctgactcagacttcagcccacgtgtcctcccgatatgaggcccatttttacgagttcatcaccttaaacgaggcgccaagtcacagcggtgttgatgcagggcaggttctttgcctggctcaggaaggaattcaagaaccagccggtggtagaagaaaacagcttgattgatggggtggcacgttacggctgtgactggccccgccatgggcagtgtgctgagagtagcagcccagggacagatctgaatccgtgcttattcccatttttaatgacatcctaattcagggggcgggttattcagaaatagctagaaaatgggcggtaacttttgagtgttgccatggccagaggtggtaacttccaggtgttgccatggcaatggtaaactgccatggcactggtgggcgtgtcttagggagaggtgatttcagcacttctggttcagccagtcttcaatctcgtccagagtcagtccctcctgcctcctgcctccgtgctgattgcaggccctgtttcccccaggactccatggcttccgagttgctgactgaccctccacctcagaggtagttctgacactgtctcagttttgcagatgaagatgagattcttcagttctccatgtggaaaagcagctgtggacccaggtctgtctggcccgcctgccgttgtgtgaaggagctcagggcctatggtctgtccacactcgcggtcatcagtggccaagcaggccagggttgctccgcccgtgtgccaggccggccaaggccagttctccactttttctcaggcccatgggtccaagtccgaagccacagaacggcaggaatgaggggtgggagcagagcagtcgagggtgcgcttgaccgtggctgagaccccctgagcagaaacgactcccccaacctctgctgatcctcctagcacccagcagcagtgcttggcacagactctgtccctgcgcatggtctagagggggagatagaccttctagatggcaaacggcatggagagatgactgtgggggcctgggggaggggtcacttatccaaataataattactgagcacccaccatgtgccacactctaagtcctggggtgtagcaggaaccaagcatatgcagaactgcccttcaagggcttgcactttagtgagaaggaaataaaattttataatattaaatgtaaaaccacagtgagataccactacacacccgccaaaatggcgaaacgaaaatgaacaccaccaaacggtggcaaggaggcagcgcacctggaactcccgcacatcgctgatgggagcacaaaatggaacagcactgaagagaggcctggccactcctcaaacacacacctgcccccaaagccagcatatctcctattcgtccaagtgaaacaaaagaacatatcccttaaagtataattaaaaatatatatatatccacacaaacactgtcacagaaacgttcagagcagttttattcacaatcaccaaaagctggaaacagcccaggcatccatcaatggaaaaactgctacatccatccatgggaacctacttgatagtttaaagaaatggcctacttgggcacggtggctcatgcttgtaatctcagcactttaggaggctgaaaccggtagatcaggaggtcaggagtttgagaccagcctgggcaatatagtgaaaccctgtctctactaaaaatacaaaaaaaaaaattagccaggcctggtggcatgctcccgtaatcccagctactcaggagaccaaggcaggagaatcacttgaacccagaaggtggaggttgcagtgagccaagatcttgccactgcacttcagcctgggtgacagactctgtctcaaaaaaaaaaaaagcctactgatacctgcaacaacatgggtaagcctcaaaacttcatgttgaattaaaccagaggcacaagaatacatgccgtatgattccatctagaagaatttctagaccaggccagaatatggtgagaaatgagaataatgattgcctccatggggcgtgcaggtagactggtgaggcccaaggaaccttccaaggggaacgctgtccttttttttttttttttttttttgagtcttgctgtgttgcccacagtcaggctggagtgcagtggcacgatttcggctcactgcaacctctgcctcctgggttcaagtgattctccgattcaggaggtagctgggattacaggtgcctgccatcacgcctggctaattttttctatctttagtagagatggggtttcaccatgttggccaggctggtcttgaactcttgacttcaggtgatctgcccttggcctcccgaagtgctgggattacaggcgtgagccaccgcgcctggccatgttctctatcttgaaaggggtttgggtcacattagtgagtgtacttctcagactcaccaaagagtacacttgacacctctgcatttcattgtttgtgaattttaccctgaaagaaaaaaaaccaaatactgacatgaatgtgaaagactgaggagaaagtgaacagatgtctgcaacttactctgaaattcaacaaaaagggaaaatggacagagacgtaataaagcagatgaagccaactgcttttgagatggaatctcaaaatctctgtcacccaggctagagtgcagtgtgcgatctcggctcactgcaatctccaccttccaggttgaagcgattctcctgcctcagcctccccagtggctgggattacaggcgagtactgccacacccagctaatttttgtatttttagtagagacggggtttcgccaggttggccacgctggtctcaaattcctgacctcaggtgatccacctgccttggcctttgaaaagtgcttgggttacaggcgtgagcctctggacctggcagagccaactgttaatggcagaatgtaactgggtgtaagagggaccactaccattatttcaagtgtgtttgaacgctttcataatgaaatgcccagaaaaattatacagcatattggaaggcctccctgaggagacacttgaaccaaaactcgaggtgagggtgtgagggacacagagatcccggggaaggatgttccaggcaaaggccctggggcatgagcctgacagggattcctagagtagccaggaggccagaggagtagcggggaggcagatcccacggcctcctgggccaccatccatcagcccttggctcttactctaagaggggtatgtggggacaggacagctgtggtcactgtcctgagagcggactgaaggaggcaaggccagggcaggaaaaccagcaaggagacaatagcagcagttctgcaagatgtggtcggggctctggccctggtggcagtggcggccgtggtgtgccatggtcagattctggagaatcttgaaggtggaacagacaggatttgaggatggactgggtgtggagcaggagtggtggaagggggtggtaaaggaaaggaaggagtcaagaatgactctgaggaggccgggcacaatggctcacacctataatcccagcactttggaagcccaaggcaggtggatcgcctgaggccaggagttcgagaccagcctggccaacatggtgaaaccccgtctctaccaaaaatacaaaaattagctgggcatggtgacgggtgcctgtaatcccagccactcgggaggctgaggcaggagaatcgcttgaaggtgggtggcggaggttgcggtacgccaatattgtgccgttgcactccctacctaggtgacgagcgaaattgcatctcaaaaatgaaaaataaataaatgaaaaaggtttttggcctgaaaaggggagacaaaagattccaactggagcacattttaggggaagatcatgggtttgttgtgcacaggtcaagtttgagatgtctgtcagacattcaagcagacacatgaagtagaggtcaggccactggattcaggggtgatggggcaggggagggactgaagggcgagtcagccctgctgactgtcaggcaggggcagagctcacagcttgggacttggggccctcctcctccacgttggcctcagttcagggctgagtctgacaaaagacaggtgtaatcactttccaaggctgacccagttctttggctgctctcagtgggcctggtcacatttaatcttctgtggcactgtgtgtgtgaggtttgtccagtttgacacacagctctggatcaaaagtcggcaaactaaggccctcagttaagtctgtttgttttggcaaataaagttttatccagatccagccaatctcatttaggctgtctaaggccactacagcagaaccaggtggctgccagagaccacatggcctgcaaagcctaaaatatttactgtctggccctttaagggaaacatttgccgactcctctccatctttcattaaacagggtgtggttctgttataggaacacacagcaagctattgaataagacatttaggtggttcccaactttttgctattatgaaaatgttacaataaacattcttacccttgtttccctgggctcctgggcacacacagtggaattcctggtgtgtaggaaagacatgggcatcttcagtttgggtcaattttgccaaattgctctccagtgtagctgaggtcagttacactcccagcagcagtggaaagagcccatctttccacgttcctctaaacttattacctatcaggtgtcctcagccttcagtagttaccagtctttcactgtgtgtagattctcttggatttcctggctgtgagtgacaggtttgctctttttttgtcttggtgctctggacccctgtacaatactgaattgtctttactagccatttgttcctggcttttaagagaatatttcatgttttaccacatagtatagtgttttacctttaagtacatgtttactatacgttgggtttttttttttttttttttttttttttttttttttttttagacaaactctcgctctgtcaccaggctggagtgcggtggcgcgatctcggttcactgcaacctccgcctcccaggttcaagtgattctcctgcctcagcctcccaagtagctgggactacaggcatgcaccaccacgcccagctaatttttgtatttttagtagagacggggtttcaccatgttggccaggatggtctcaatctcttaacctcatgatccgcctgccttggccgcccaaagtgctgggattacaggcatgagacaccgcgcccggcctgtttttgttttttgagatggggtctctcgctctgtcgccaggctggagtgtagtgacacaatcttggctcactacaacctccacctccctggttcaagcaattctcatgcctcagcctcccacgtagctggactacagacacgtgccaccatacccagctaatttttttgtattttgtaatttttgtattttgtattttttgtattttttttttttgtagagatggggtttcaccatattgcccaggctggtctacaactcctggactcaagtgatctgcctgccttggcctccccaagtgctgtgattacaggtgtgggccaccacacctggcctattttttgttgttgttgttttttgtttgttttcagcattttttgttgtttttctgagaaagggcctctgtcactcaaacgatccttcctgagtagttgggactataggtgtgtgccaccaaagccagcgaattttcttatttttttttttttttgagacagagtctcactcttgtcacgcaggctggagtgcagtggcatgatcttggctcactgaaacctctgcctcccggattcaagcaattcttgtgcctcagcctcccaagtagctgagattacagaatgcaccaccacacccagctaacttctgtatttttagtagagacagggttttgccatgttggccaggctggtctcgaactcctggcctcaagtgatctgcccacctcagcctcccaaagtgttgggattacaggcgtgagccactgtgcctggcctaattttctcatttttgtagagacggggtctcactatgtggcccaggctggtctcaaacttctgggctcaaatgattttccaacctgggcctcccaaagtgctaggattacactattactccttcttaaatttctttgaaactctgctcatggattttctgtatttattatctaagtaatacatctatgtaataaggctataaatctgattttttttttttttaaagaaatggatcttattttgtcaccgaggctggaatgcagagctgcaatcacagctcactgcagccttgaactcttgggctcaagcaattctccagtctgggccccccaaagtgctgggattacaggtatgaaccaccacacctggcctgccatggcccccctcccaagttttctttcttttttttttttttttgatggagtctcgctctgtcgcccaggctggagtgcagtggcgcgatctccatttactgcaagctccgcctcccaggttcgagccattctcctgcctcagcctcccgagtagctggaactacaggcgcccgccaccacgcccagctaattttttgtatttttagtagagacggggtttcaccatgttagccaggatggtctcgatctcctgacctcgtgatccgcctgccttggcctcccaaagtgctgggattacaggcgtgagccactgcgcccggccaccaagttttcttagcatatgtatcctcattttttgtttgaactaaataatttttatttatatatgacttcatatttagaataggtttaaatttccacacagctggagcttacgcggcttttgtctgtggccaaagaatatggttgaaactgatttgatatctgttgagatttgtcgtgcaccctagtagttgggtcatttttgtaaatgttccttgtgtgattgaaaataatgtgttggtctcacacaggtctgaaatttaaattttaaaagttaaaaaactaactgtcaggttttctattggggttcattgatcttgattagtaactgtattaacatcctctatgtccttttttttttggttgtttggtttattagttactcaaagaggtcttatgtctccctatgatggaggacctggcaatttctccttgtgttcttaatatattttcagcctcttttttttttttttcgagacagagtctcactctgttgcccaggctggagggcagtggcgcaatctcagctcactgcaacctccgcctagcaggttcaagcaattcttgtgcctcagccacctgagtagttgggatgacaggcgtgcaccaccacgcccagctagctaatctttgtatttttagtagagacagagttttgccatgttggccaggctggtcttgaattcccagcctctagtgatccacccacctcggcctcccaaagtgctgggattactggcatgagccactgcgcctggcctattttcagccttaaaaacaaaaaccctggaacatagaagttcagaactttcctctcttcacagagttcctcctcgcatcatttcatgttgatcctcttatccccagtgtcttctgcctgaaggcctattttgtctgagttttctataggtacatcttttggttagtttttctctagtacaccttttcccatcgttttactttttggtgcccttaggttttaaatttcctcttgtaaatagcatagagctgcatcttattttttcttggccaatctggtcatctgtgttttaagaggtgaatgtaaaccacattttctacctctggttttgtactatatatttaccatcccttttactttgcttcctttttctccctttctgccttccattatagttttaatacccatcactacccttttctctgcattggcagttatagttccgtttgtattcttttggtgatcctcttaaatatctgaaatacacacctgactttacaaagccagacaatgctcagtctctttaaccccctctcaaattgccctctcagtcttccatgttcttgtgtctcatgcatcttgtttctgtggcccacaaattaatcattattattcatattgcatattaaatgcttgtttagattcacatgtttaccaatttgctcaccatttttccatctaatttcttccttttgggttccatgtccttgttactaaactacattctttaaaaattatttcggcggccaggcgtggtggctcacacctgtaatcccagcactttgggaggccgaggcgagtggatcacgaggtcaggagatcgagaccatcctggccaacatggtgaaactccatctctactaaaaatacaataattagctgggggtggtggcaggcgcctgtaatcccagctactgaggaggctgactgaggcaggagaatcgcttgaacccgggaggcagaggttgcagtgagctgagatcgcaccactgcaccccagcctggcgacagaacgagacttcgtccccctcccccctcccccaaaaaaatgttgatcttcagtctgcgcattctgctctggattttaagcatcatttctggcagctctttttcaggaactgtctctgcaggtctttcagtgttcgcctctggagctctgctcgggcccgcgagttctcctggcgttgccatctgtgcccttttccttattccccatcacctgtctctctggtgagctgcttccgatcagcctccaggtccacgatttctcttctgttgtccttttctgccttctcacctcatcctctgagacctgaatttcgatggctctacttttcaattatattattctttttcaaacctgggcgttcatttctagcatcctgttctatcctgtgtctgactgtgcctcccgcaccttctcccttctctcgccctaagccccgtgaaggcgccgggcctttggctccggctgtttcccacggcgcccagaaccgcgtcagtcctgacacagactcggtgagggcgggaagtggtgccgtggggctgcagcctggcccgcccgctccatcggcctagggcggccccaccgccctccgggccttaccttgagttcgggctgcgggagaagctcccgcgctgcccatgacgtcacgggactgtgacgcgcccagaagccccgcccctcgcgtcccggtccgcggacccaggctctctgcgccgtgacgtcacgggtccgggcgggcgggttgtgcgtcggcccaatgggagcggcgcactggcctcccctttaaggaatgttgtgacctgacgtcaccgggcgagttacctcccgcagccgcagccgccgtgctcagcgcgagccccggagcccttgagcgcgaggcgcggagcccccggagcccccaaaccgcagacacatccccgcgccccagagccccggcctgcgcgcccagccgggcccgcgcgatgccctcagaccggcctttcaagcagcggcggagcttcggtgaggcccggcaggcgagctgcgagctctggggcaggggtgccggccgaccccgactgccgcaggtgacgtcagccccgtgacgtcaggctctggctggaccctcgggctgggaccagctccggcctgggcgggggctgcccgcttccccaccgcgataggtgccaggggctgtggggcctgatggccccgggggtgggggctggagctggggcgtggccgggggccgcccctccgggacaggcggggcggacctgggccggcccgacccggcctcacggtctggccgctgtccgcagccgaccgctgtaaggaggtacagcagatccgcgaccagcaccccagcaaaatcccggtgagtcccgcacccccagccctgccccgcccccgcctcgcgcgttcccgacacgaccccctgcccgcccgccctgctcccaggtgatcatcgagcgctacaagggtgagaagcagctgcccgtcctggacaagaccaagtttttggtcccggaccatgtcaacatgagcgagttggtcaagatcatccggtgcgtgggcagccgccgccaggaggtggctagggtcgggaggggagccgggttcccgccgagaaggggtgggagtggggtcaggggtgatgggaccgggcggtgggcccctgttctggggtggctggaaaggtcaaggtcggggctgcagtcggtgttgggtcagaggtgacagctggggtgagaatgggtgtgaaaggctgggaatcattctgggggtcagggctatgtccgtcccgcagccaagcccctcacagctgcatactctcccgccggctgcaggcgccgcctgcagctgaaccccacgcaggccttcttcctgctggtgaaccagcacagcatggtgagtgtgtccacgcccatcgcggacatctacgagcaggagaaagacgaggacggcttcctctatatggtctacgcctcccaggaaaccttcggcttctgagccagcagtaggggggctcggcctgggagtcgggcggccccggtcaggccctgcccagagagctcctggttcctgaactgagctgcctctaccgtggtgggctgggcaggcatgtgcccccctagtcagagggcaccaacccacctactctgcccctgggtggatcctgggccggtcgtgttagggttgtccctctgggtgctggctggtgggatgggggagggtggggagcagctcccagcacccctgctgtgtggttcatcttttttttaggcccctgcctgtctgcccatctgcccctcacccacccgaggctctgcccaccgcctggacctgcccacccctgaaagactggcccctggctccccgcccctcggtctccacgtggtgtatggatctgtggtcattgtccctctgcagaataaagattgctcaggcctgcctggccctgtgcctccagccgcttgcttgggagtggggagggtgctggtggggctgcccgcaccatccccgggctctggcgcacagacttgtgttctgtggccgcggtgctcgctctggaaacccacacctgtgtgtagtgttccagaacattattaggggccaccccctctaggagtgcaatgcagatgtggtctcagggtagacttcataacaaaaaacatttattaagtagccacaatctaacaagccctgctcacctgcctcttctccttcctgtctgggagggggctccttggtgtgcagagccacaaggtgggggtccaagttggggagctcccagttcttccccataggccttgctgtcagtcagccatgggtcccttttggtaccagagacttgtgaccctggactcgaacctcttctgcccaagcactcgcctgctggcaactctggctggagggcttggcccagcttctggccccacagccccctgaggtccatgcagccctgtgccagccaggcctacttgagcacgagcatggcctctgtgccatccttggcggtcaagtagaggccatgtgtgaggtagtactcccgccgcaggaaggcatagaagtaatcagagatgagcaggatctggggggagagagagggtgtgaggcgctgctgggtacctccccctaaacccaggatccctgaactgctggcaggtgttgttggaagacaggaacgcccctgcctggctctggatcacaatcactggagaggccctcctcagggcccccacctcagggcccataattgaccctgcaaggtctggcctctcagaagctgcctggactccccctgcccccacccatggtctacacctccatcccaggctctggcctcgaatgccagcctggtgcctgtgcaaccagaggcctctgccccatcctcccacagccacttccatcccagccaggtccacatcaaactcctcaccttccctctgtcaaatacacttctcccactcagcatccatgcccccatcttccagccaggtgcccaggccacaaaattgccctgacacttctctcatacatcgagccaccatgacctgtcaattccccctaaactcaaatccaccctttggatccatccccacagtcactactctggacagagccactgtcatctcatctcctaaacaacagcaaagcttggtccttgggctccctgctctcaaacccgtgcccaccccattctccctggcagccagagggagcttttcaaaacccacatctgatggtgttacttccagccttcaaatcctccaaaggcttcccaagccttagggcaaagctcgaactccctcgtgctctgagaccttgctagggtccctgtccgccctctcccggctccacctcaccccacggcaggatctttactgtttcttctgcctggaatgttctctccccgttcatctagttgacagctgcttactcttcagggctcaggaaggatcacttgccccccagattagttcttggccccactaatctctactcgataacagactcatcgaaagtgtaattttccattcagctgacagcctgactgtgcctcctcccctggcccggggcctccatcagggcagggtcttcgaatggttctgtcactatggtatttctgtgcccagctcagtctgtctgtcccattctgggccacacacagaagaatcaaagggagcctagaagctcagcccactgtctcttcaaggaggcccagaaaggaatagggatttgccaagggccctatacaccagacccggagtctgcaatcccagtcagcccaagcttcccaagaccactggtccctggagcaggttgggcagggcccagcctcagagaaggatgaggggacaggggctcacactacagacaccgcagctctcaggcacctggaggcctcagaggattggcaccaaccacctggcacagatggggagactgaggcacagagcacttggctatggtcttggggcaagacaggttgagctaagcctgggatctagacctccagaccctgtcctgggcagcttctcactgacctgaaggtaacacaacagcagctaaggagagatcagaggcgcctggaggagttcaggaaggtgtcctgtcaccagcagctctgatggcctcaggacaagtacctgccattctatcaccacagaagcccatctggaaggttgaacaatcctcatcttaaacagatggggaaactgagactcaaagggttcaatggttggcctaaggctacacctggagcactggactaatggccatggacccagaaaggtggtctgcctggggcccagatcactgatgagcacgagattggtcacagcgtcagcaaagcagacagagctcaggcagcccccgaggccctgcccccagctgcccagctggcagctccaggctggcccactggggggcagtgatcacagcaaaggctgacctcataccctgcagccctttctcacccaggcccgagatgccatctgggcaggaggagcccaaagcaggggctgagctcagaggctgatccctgaaccaggtcagctgaggggcaggtgcagtcacaatccacaacaatcaaaacgaagcaactccatgtcacacaataatcatctggacaagaagcaggaagaaaaagattaggttattaggttggaccatatgaaattgccagttttgcagataaaaaaatggttgaatactggcaatttcatatgatccaacctaatataaaacggaaaaacgtacacatggaaaagtaagcatgttatttagaagtaccaacagaaataacagtaagactttaggtagctattcttttcccctataagccttaactttgcaaactacatacatgtattccattgataaaaataaaacttcggcgaggtgcggtggctcatgcctgtaatcccagcactttgggaggccgaagcaggcggatcacctgaggttgggagttcgagaccagcctgaccaacatggagaaaccccgtctctactaaaaatacaaaattagccgggcatggtggcgcatgcctgtaatcccagctacttgggaggctgaaggcaggagaatggtttgaacctgggaggcggagatgcgccattgcactccagcctaggcaacaagagcgaaactgcgtctcaaaaagtaataataaaaaataaagcttcaattaaaacaaatcagccaataaatcaatgaatcaatacatcaatggggggggggagataaatcttccttccagaagaattccaaacaatgtaggtagttatatccccctcccatagaaggagcttaattcttgtccactctgcatctcctaagcctaggggggtctagacttggttactcacttcctcctgaggagcagggaaagggaaaagagtaactttacagtggagagacctggccaacactatcttaaccacgtggtggaggttaacatcagcttgaaatcacgtggctagcatgtaaccccaatagatgtgatgagaagggcactttgcctggggtattctttctaaaaacccacaaccccaggatagtcctaagaaaagcatcagacaaacctaaactgggggacaaacctaaattgggtgacattctacaagatacctggccagcgctcctcaactgtcaaggtcatgagaagtcagaaaagactaagaagaaaagcagaagacactggggagatgtgaccttacatgtaatgtggacctctcgatggggtcctggtagagaaagaggctgtgactggaacaacaggaaatccaaatccattctagtgtttcagactaatagtaacgtatcagggtgagtgtcttagttttgacaaacacatcacggtaaaatataagatgttaacaacttaggcaactaggtgggggcttacaggaactctgttctatctctgcaacttttctataaatctaaagtgattctaaaataaaaagtttatttaaaaaataaatgaactagctgggaatggtggcttgtgcctgtaattccagctactcgggaagccgaggcaaggggatcccttaagcccaggaggtcgacctgggcaacagagcaaaactccagctcttgaaacaggaaaaaaattaacagcaatgacctattgttgtatgtaacaaactcaaaatattttgctgagtgaaagagagctttggcaaatgtacacaaaagatttgcacttttccctgtataataaattttacataagaaaatgatacacatgctgaaatatttagcaggaaatgtactgatgtctgcatttcaatttgaaatacactaaaaaagtaagatggactgagggatgatggaagaagtacctgaagatgtgaatggtggactcccgctggtgggtatgtatatgggtgtccaatgctaaagctgtcaactctgctgtgtgtgtggaaatctggaggataaagggggtggcgggaagagccctgtgagcggcttgggcacacagccctgggtgtcatcagtcctgagtgagcaccctgcccccagggagaggacaccaggctggccgagaggcctggccctttcagagggaagcctgtagccaggacaacctcttctgaccttggggctttccatttgggccgtgaggagagcagggatttcccagaggccctagggtgcagccaacacagcagctgcagacccagagcccctttgcccagtctggacaggggcgagttgggcaaggggctgtggaatttgcatgggcgagtcagcggctgtgtgatattaagtctcttcctgtcccctgggctgcattttcctcatctggaaaatgacagtaataggctctagcttgttaccaacaatgctgggctcctctagtttttttttgagacgaagtctcgctctgtcacccaggctggagtgcaatggtgtgatctcagctcactgcaacctccgcggttcaagtgattctcccgcctcagcctcccgagaaagctgggactacaagcgtgcgccaccacccctggctagttttttctttttttgtatttttagtagagacggggtttcaccatgatagccaggatggtctcgatctccagacctcatgatccgcccacctcagcctcccagtgctggtattacaggcatgagccaccgcgcccggccgggctcctctagtctttgtgccagttaggaccccagaacatgtcactctgtgtcctcaggtctctggatcccacccaatgtggctgaaatactgccttgccaatccccttctcagacttgccctcttctcttcctgcagccacctctctggacacacacacacacacacacacacacaggtgcacacacacgcacactcacactgctcacacatgcacacacaggtgcacacacatacatgcacgcttgcactgctcacacaggctcgcactgcactcacacacaggtgcacacacacaggtgcacacatacacgcatgcttgcaatgcttagacacacatgcttgcacacacacatgctcgcactgctcagacacgctcacattgcactcacaggtacacatacacgcacacaggtgcacacatacatgcaagcttgcaatgcttagacacacatgctcacacacacagatgcacacacatacacgcacgctctcactgctcacatgctcgcactgcactcacacacacacagatacacacacatacacgcacgcttgcctgctcagaagttccctggctccccctgccctgcccagcagcgctgcagctcccacctatccctcagaggctcatctcctgccaggagtcttctctaaccctgcattgttacatggaccctgaagtgaagtcactgcccactggcctcccaaccaaatggggctgcatttgctccagttctatggccccaggcccggcacagggccagctctctctgagttgtttgctggtctgtaccctctcagcgctgcccccagggacggctcggtccacattcctctctatggcagccatgagggctccagggccgcctccctctgggaccatgatgaagagctcatggggcagctagctgataaaggggtgaccagggacagacaggatgaatcagaagtagaacgaaaccctcagaacatgctctagtgcagggcaggatggagagacagggaaatgaatatcttctgagtgtctgccctggtccaggccctttaacaaaaaaacaatattgtccctttccaaccccccagggtagggctgacaatgcctacttagagaagggaagctcaggggttatgggccctgcaaaaggtcacatggtaggaagtgaagagttaggggccagtcctgcctgtcagaggcccaatcctgagttcttccacaaccccctagggtctgcacccacatgaactgagtcctgctacatgccaggcctgtgctgacacctcaggtacctttacaccctgcggagtctgctctccccagttcacagctctgtcactcagtggagagagagagagattgactttttttgtaaaaagccagtagaggttgttaatacagtgtgtcttgaaactactgggctcaggacagcagccttgtccaccaccagggctgcagattcctagagaagcaggtgctatcacccaggcatgtcctggttccccaggcctcctgctgctgttggggacacagacactgacatttgacagtcagcccacgctggggggaatgcatgtggccgtcacagttggcaaagtgcagcagcctctgcccacctgcctgggatccaggaagctgggaggcagaggaggctggcggccgactgtggagctggacagcactttggcgtaacctggcaacccacaggccggagcggacattatgtaggaggaaatggtggaggagaaaactccaccctccagctctgaagatgcaaagtaacaagtgaaatctctggacctcagtgtcagggtctgagaggtcacaaggtgagactgaggatgaggctacaagtaactgtcccttacatggcacttttcacttacatggcacttttcccacattcagtcctcaaaaccaccttcccagtttgaggaaactgaggccaccaccacctcccccagatttcaacctcccctagcctcgtccctggtgccctggatgccaggctcacacctcttacctctgctcttcccagcagtgaggttttcagagcatggatctgatcacatttatcctcagctcttaaagccaaaggtgcagtctggacctctgcataagaggcccttgaaggcctgtggtctgaccactgctgtctgaattgccctcattccctctcaagtggtacagccagtcccactgagctcccagcagcacggtgttcctcctttgctccctccttcctcctctctctctctctctctctctctctccctccttcacccccacccaggtcttgctacctaaaatcatagaacccagttagatcctacccatccctcaggaccccacttagaggccaccttccccaggaagcctccttaacagcccagctctgggctcccagctcgtcaggctgccctgtcctgcccatgtcttttcctttctctccacagaccgagggctccttggaagtacacctctgtctcattcacccctcgcagagtgcctggtgaatagtaggaacctaattaacatttgcaaataaataaattagcttcccaggagttacgggatgtgcctgaggccagcgagccaggacagacagggctggagtcgctatagagtttgggcttccagagccctggccttctgtggcctttgtcctgctgtatgtagcctgggctcttcctgtcactctggttgttggggaggagaataggctgggaagggcctgtgagggacaagcttgggatgctcagtgctggaaggacaaaggaatgaactaagaccttgacagaattacactagttgggaaaagcaaagtaaacacgcacatccagcaggatgaggacaagggctccaggttggccacaggcaccgcatatcgggagcaacgagccttcccacacacagacctgggatcttgcacagcccaggccacacacaaccggcaggaagaaacctgaaatgggtctcgagccaaccccaaatgggggctacacaccactcagccactaatgacccacccaacacgtctccaagcatttcctcataggtcccatttcccagaatgacacaccaggccaactgagaggcaactccgggagacaggattgtggtttcacctgtgttgcagtgaacagtgagtcccaggcaggggacaggcagcatgcaggaggttggtgtcagacctcgggcttcaggcctcactcaaaacagaaaggagaatggccaatgcaaggccagcccagtatctgagggtctgcagtacagggaggggtcagggctggcccctcatggcaaataggcagtggcttgaggagtagggttccagatgatccagatcctgcttggaagggtgggtggttggccaggtgcggcagctgacacctgtaatcccagcactttgggaggctgaggcaggagtttggcttgagctcaggagttcgagctcgtaacaacatagcaagaccctgtctctaccaaaaatttaaaaagtagccaggtgtgggggtgtgcctgtagttctagctacttgggaggctgaggtgggaggacctcttgagcctaagaggttgaggctgcagtgagctgtgactgtgccactgcaccccagcctgggcaacagagcaagaccctgtctcaaaaagaaaaaaaaatgaaataaaattaaaaaaaatttttttgagatagcattttcactcctgtcacccaggatggagtgtagtggcgtgatctcggctcactgcaaccttcgcctaccgggcttaagcgattctcctgcctcagcctcctgagtagctgggattacaggtagcttgccactgcacccggttagttttgtatttttttgtagagatggggttttgccatgttgcccaggctgttctcgaactcctaagctcaagcgatctgcccgcctcagcctcccaaagtgttgggattacaggcacgagctactgcaaccggcctactaaaataaaatttaaaaaaggaagggcaggcagacgagaagtctgctttagatgtagacacagggcaggagtggggctctcaggccagctactgggatacaagggtaagggggctctggctctgaccccctagtaatccagtagactagccagaggcccaaatcagaccaaaacagggattggcacggggaggtcagggtgtacagaaatgtgttagagcattggtcataaaatgtggtttctgatgccagctcattcaatttgtcatcaataagtagtcactgaatattcttcttggtgctggggatacagccatgaagaagacagacccagggctcgccctaatggaacccacagtctactaagaggatgtgacaaacaagactgtggataaatacaccccttcacagcttagtgagtttgggtaagtctctaacccttccaagcctcagtttcctcatttgtatcatgagttaataatagtacttccttcaaagggctgttatgaggagtaaattccttataactaaagaaaaaaaggaaaacaatgtaaagggctgtcagtagagtagttacataaagtgtggtgagttcacatatgcaggactcaaataaaaaggaggttcctctctcacatatgagcaaggaaagttcacccagacattttactaaaagggaaaaaagtcctactttcatcattatgtcaataataaaacacacatacccacatacaaataagcctctctctccatgagcctatgagtttatgtaaatgcacacagaatggttcggaaggccatctgagcacgtgatcagaagattatagggatcacgtggggccagcccctagtaagctctcctgaaacatgagccactgttatttatttttatttttttttgagacacagtctcgctctgtcgcccaggctggagtgcagtggcacgatcttggctcactgcagcctccaccttcagggttcgagcaattcttctacctcagcctcccgaatagctgggactacaggcgcgtgccaccacatccagataatttttgtatttttagtagagacggggtttcaccgtgttagccaggatggtcttgatctcctgacctcatgatcccaaagtgctggaattacaggtgtgagccaccgcgcccggccgcataagccactattaattttaattttaggagaagattttcttatgttctctgtttttaaacagaatgaaggtgagtgtgacactttgccctactcttttaaaaaagctaaatttaaacaagttcctttttgtttatatgtaatccttgattaatattttccacctgctggtcactgactcacaaaataaaagggttaaaaaaaaactgcttcctttggttcatggactgtctctccaggaatctgctctgggtatttgaagagcatgttgctcttgctgtttcccatgtcaacacacatgagtaatggcaacaggacccacaagttatgtccaatcctctcaacaccctggaagctgtgggtcatcatcccggtttttgagataaggaaactgcaacctagagaagttaaatcacttgaggaagtgggggaggccctcaagaaatccactggtctcaatccctccttcgttctctcacactcaggcgcaccccccaccatggatggtttactgttgtcatttcctgttactgactctgaggaacaaccataattagcaaatgaaccatgccacaggcagaaaaataatagctcccagggtaaaggatggggccttagtcactggtttacctgccggtataactaataatccacacataatttgttctgtaatagggtatggcactgaacaactcaaacagagcaggatttaaaaaaaaatctataagccaagatgttctctatattcagctcttgatttcagcaatgatatcaaggttctagatacttccttgaaatctgtactcatctggttcctaagagagctctgctttgtcttgcccaaggaggagaaaatgaggcaggtgaataccaggcaccttcctagctcacagcaggatatggaactgagaacatgtccccaaatcccgtacgtctcgatggaagacacagaagcaggggctgggtttgggctgcgcaggacatgcaaggctgagaaaaagacagtgggacaaggggacctcatgaaaggtctctatgaggaggtgacacttcactcttagtaaaacttgaaatgtctcattttgcactctgaggctcccaacaggtccaaaggcaagggtggcataactttcatgaagaggggctctcttacctcagtcagcgctctgggacaaggacatgcctcgagtgactgcctcagtgagcaagtggccccatctgatgcaccctgttagtgacctggcagcagcagcaacaaagtcgaaagccagcagccccaggaagtacttggaccccctgctgggaggcctgtaggttggtgtggcctgcctgaagggcagcttggaaatacctgccaaaggcgtaaaatgcatatgccccctgacccagcaaatcccaccacgtggaatctactctataaaactccagcatgtgtgtacaagaatatgtggagggatatgcaaggctcttccattttatttatttactatttattattacttttttatttactaattattatttttattatttattgctattgaccagcctggtctcaaactcctgacctcaagtgatcctcccatctcagcctcccaaagtgctgggattacaggcatgagccaccaggcccggctgcaaggctcttacatttaaagtgacaaaataggctgggcgcagtggctcacacctgtaatcgcagcactttgggaggtcgaggcgggcaaatcacttgaggtcaggagttcaagaccagcctagctaatgtggtgaaaccctgtctctactctctaccaaaaatacaaaaattaggcgggcatggtagtgcacgcctataatcctggctactcaggaggctgaggtgagagaattgcttgaacccaggaggtggaggttgcagtgagccaagatcacgccattgcgctctatcctgggtgacagagtgagactctatctcaaaaaataaatatataaataaagtgccaaaataaccaagggcaacctcaatgcccatcagcagggctgtacctagtccaaaccactggatgttacagaggtattaaaaaattatctcaagacaaaatcattaagtgaaaaacagcaagccaaagaatgctacttaaaggagaatgccatttacctacataaacaaacaaacaaaaaaccctctttatgtacctgtgtctatagctgtctataaatgcacagaagaaagtctgcaaagacacataccaaactgatcccaaaggccacgtctgcagaggagtagaaaatgatgggggctcaggcagatcttttcttttcattgcatagtctttttattttttattttttggtagagatgggcttttgctatgttgcccaggctgttcttgaactcctagcctcaagtaatccttctaccttggtctctcaaagagctgggatcacatgcatgagccaccacactcagcccattccatattcttctattttgtttgacttctttcccccagcaataatgaattcatgtattacttgatgatttaaaatacattttaaaaagagattaagaaaaaaaaaggtaagagatcatgccaagagtccagctggtttctctcagctatgaacacacttgatccacctgcctttggtttccatccctaaccccaatccctctttccaataattcagtttctcctgccttcaatggcacctgaccacttgcagacaaccccctgtgctgctttagagtcccttctctcagaaaggcagccacagagaagaaagctgttatctggcaagttccatggatgcttcataatcactgcaactgtatttccagacccaaacttaagactaagactcatgacaagacaacaggctgtggactatttctgtggagcttgccaacctccctagaggcccagggcaggcccaatgcccacccatgccagctaccactggaaggtaaggaaaaggaaggagatcccagaaaggcaggagagccagggcaaccttctggattccttcaggatatgcaattgagccctgcagaattctgcctgcgtgggtcagaagtaagagaggctgcgcatccaccaaccctaactacagtgtgagagacagaacaggccctccggctgggccccacccaggctacaaggccctctatctctctttcttctgctcacaaaccaagacaactggctgggctgaacattaatcctccagaaatgtccatgcaggaaacaccagtcccatcactcactgaaaaagccctaactcctttcttttcccgcagctaaccttggaggcaagaattaccctggggattattcactggcatcattagtctttccagccagcctgcttcccatccaggctattacacataggaaatgcctggctgtgccaatggcaattgaaatggtaaatggtacaagtgattctcaaaagacttccactacgaggccagagcctgacctgagagaaggcagcacgtggaggagggaacttccaagaagcgtgggtgagtccacctagagtttgctagacccactgccacagaacctctggaagagcttattaaaaatataaattcctgaccctgtattccacattgaatcaacatttctgggagtgggatcagagaacctggctttttaaaacagagccatgtacttgggacggctgcaacataattgcagagtttaaagcctgttaacagggaatctgcatttttaacaagctccctctgaggattttgattgagaatcctgctctgtggaacagagggacaggcttcccagctcaggggaaggctgagctccttgctggtactcctcagcctgtgaccacagcctcctctccaccgctcccagccacacaatttatgctcaactccccaacagccagaccggcccccttctcctctgcctgcctttgttcctgctgtcccgagagtccgcagagcctctcctccccttgccttgccctctccccctcactctatctactccctatgggtgctggaaccacaggcaccattacagaaaggggtgcctcagaaatcaagccttatgtgaattttgttcttggctcctccaatgaccttcgagaagagaggacctctgcaagcctctgtccctcatttgtaaagtagggctaacatgccctgtctcctaggcttgctgagaatacagcatggctatggttcagtgtggtgcccaatacatatctgccaggttcagccttacactgctcttacttccccgtcctcactgactgggagctacttgaggggagtaactgtgcctccttcacgtctgcaccccccggtatgcagaatccaaggccatcgttgaatgcttgaggctgcaaaatgaattcctgtccccaagctgacccccatgctgtccctcttacctgcccaacgttgaaggtcagtgtgatggcataaaagaaattagagttggcacttcctgcataaatccagaggtgccacaggacagggaagagcagggaacagacgatgatgatgcaggtgaggacaaagatgtttctcaggactgcaaagacagagggttacagttagcctgacacgctctctctggcatgctttccctgctgcaatggcccccctgaatggagaggcccaaggtgagcatcatgtagctcaaaggcagagcacccccagaggtactggggtgccaagaagcaaaccccagactcctcagtcaatggctccccatgcccacagctggtggtagctcctggatttcgattatttcctcccactgtgggcttggctggctgaagaccagctatagttagaaatgccatgagtgcctcggggcaccaaacagggcatttcaggaagatattcccctcacctcctaatcttggagggtccaagagtatccctctccccaagcagggtgccatctggccatgtgggattatgggtgggaaccccagcatgaaccgtgacgattagagccccactgtgggtctccatggtgccacagtcctgggtcttaggaacacgttttccattctccttaactggtgtcttaggacccctgcctcgctcttcaaacattcccaactctcccttagatgataaaggacctctttttgacaccgtctctcactccttgcctctaagggaatgccgaatcccaccaggaagaaagctctccctgaggtctcaggaaggacctgctactcaagggtgatccagaggcagacaggctggctggcttcagccaaacaggagtgtagcatggcagccgggtacagaccttggttaaaatcctgctctgcatttattagcaagtttctctagacctcagcttcctcatctgtaaactgaggctacacacctagtatgtacttataaaaattaaaaattagggtgggcatggtggatcatgcctgtaatcccagcactttgggaggctgaggtaggaagattgcttgagcccaggagttcaagaccagcctgggcaacatagtgagagcccatctctaaaaaaattttaaaatttaaaaataaaaaatgtttaaaaataaaaataaaatggggctaaaatgcacacttcatttggtaaacaagatgacatgtgaaaaaatgacacagatatatcactggctacattagttttccattgctactatagcaaattcccacaaacttagtgatttaaataatattctttattattaaacagttctggaggtcagaagttccaaaatgggtctcacaggctaaaatctctagaggagaaccccttgcttgccttttccagcacccagaggccccctgcattccttggttcatgacccccttccagctgcaaatccagcaatggtggattgaggccttctcacattgcatcactcagaccttctcttctgcctccctcttccatcttttttttaaaatagactatttattttgagatggaatctcactacattgcccaagctggagtggagtggctggatcatatctcactgaagcctcgaattcctgggctccagggatcctcctgtctcagcctcctgagtagctggaactacaggcatgcacaaagaagcccagtggactttattttttagggaagttttagtttcacagcaaaattgggcagaagatttcccatattccccccacctccacctcttccactttgagggacacttgtgattacactggggccacctggattgtccaggataatctcccctcccaaggtcttaaagtccctttgccatgtaaggcgatgtcttcacaggttctggggattacaacgtggacatctttgtgaggggagggctactaccctgcctaccacactgtactttttcccccgttttaactctctaggggttatcacacaggaggattgtctgttacttttctttatctttatcatatttttaaaaactaataaatatcatttaaaataattaaaagaatacctttttaaaaagaacttagcactgtgcctggttcccagcagacacttaatgaatggaagttcccttctcttctctgatactgaccttcaggaaatcccttctcccaagtgacagttttgagagacttaaagggtggagaaactcccaaacatttaggccatttatattagttgtacaacttagtagagatgctatactgggggctcatgcattgcaaggggcctagatgatacagatgattctcaactcccgctacaaaacaaaatcacggccgggtatggtggctcacgcctgtaatcccagcactttgggaggctgaggcaggtagatcacctgaggtcaagagttcgaaaccagcctggccaacgtggcaaaaacccgtctctactaaaaatacaaaaattagccaggcatggtggcgggtgcctataatcccagctactcaggaggctgaggcacgagaattgctggaagtggagaggcagaggttgcagtgagccgagattgcaccactgcactccagcctgagcaacagagcaagactctgtctcaaaacaaacaaacaaacaaacaaacaaaacaaaatgaaatcacacggagagccctcagactagtcaaagtctctagggtggggttcaggcatccatatgaggttttaaaagcttcccaggtaattccaatatgcagtcgaggctgcgaaccactggattacagctgcagccccttacagtctgcaacagagatgccacccaactgtgtcaaaaggagaataatcaggacacggtagttcacagttctttgtaaagctgaatgttttcaagttacagttcattctttattgagaaatgataggtatcattttgttgttgtcattaaaaagtccttcattttataacatggggaagaatggctggtagttgattgttttaatgtcttcagcaaaataaaaagctggcaatctgtcacccgagtttattgaaacattagtggtctaagaaatcccacaatttggacactggcctggagggcttgcaagatcctcttttctaatctgaagtttctcaattctgggttttcaaagatgagaggccaaaaccctgactcaagcctcctgagacctcccaggaacaaggagtcttgcaaagggacgttttcactgagaattactattattattaaaccatgttactacctcaagaaggagaacaaatgcttcccactcctctaacccaacatcactatgtacatttctcagtggttctttctgatcccctggaaattattttgctgaaaagaatacagactattcccaaaataaaatgtttgcagcctgccagaccaggtggttcttgttctgtgcctccagccagggacacagatttcagacagggtgacaggaaggaaaccaagtgcaaagagacgagagaagctcactggcagcctctgggtgctatctcgaagggctgcaaagatacattcccatgcggctagagaaccatcaccagcatgcagttggcttctggcctgtggtgacctctgcaggaatggggagctgctattcactcttgctggctgacaggccagaagattaaagctatatatgccagagcagatggagctggagacctggggtacgggacagcttgttccaggcatcagaaagcgtcagaggtgaccagggcctaacaaggtgaaaggcttcacccttcatcagacttgcgaggccagatggaatcaggttccccaccacattcactgggtggcttatccaatctctggcaccatgattgatgaactggaacttcaggcaagccactttcccttcagagcctcaggcattcggaaagaaaatctcacctgaaaaatccagtccaatcagaaggggaacaggggggatttggggacttcaaaggccatggtgatattccctttcttaaacgaggtgccaaaacacgtgggaatatattttatcatgattctttatatgtatatctatcaacattcttttatcgctatacaatagtaataaaaacaaaacaaacacacacacaaatccagccctttggtaactggctccttctgctgtaccatgcaggctggcatgggttctgccagcaggctgttccctaacaccacaattgtgcgtctgtatgactcatccaagctccagagagtccagcgtctgggacctacactcagggaggggccacgttccttttctcctctccactgcacaggaaaacagaaaggtgaatgtgggagcatgcatgttagcgctgacagctaatgtttaaatggaattcctagccacattaaatatattcaacgtaggcttaaacacgtctcaacacatacatcccactcataggtcctaaggaccagggctgatgctgctcccagctaataatgattcacagttgtcaagccccaagcaggttctccaagcacgtgtactccctgctgcaggagcagtgaagcaaaggtggacagctactgttctctgcaggatcttcagacaacctgaacctgcagactatgtgccctgccagccagcaaaagcaactattagatcattcaggtttctggaaaccccatccttcttctttgtgcctcctcaccccagagggcataaaatagtttattcgtcttgaaaaatatgtttattctgatgactctggctaccaagcccgaagctctgatcacggaactatgtgagagactcccctgcataattattactcacgatactaactgcagtgctatttacagatattctttctcaaacttaacacactcatgagttattttctttatttgattaatggaaaaatcagatgctcagaaaggttaaatgatgtgcctaagaacacatggggctcgtaatggcaatgccaggaatcggagtcaagtgactctccagactgctcagcaaatgggatgaaagacagtcactgagagagaaagagtgcccagtgtgggatgggcaaccacaaaaatccattctacattcttgaaatccactatcacaaactgaggcatgtccatgttttggtggtctcatggtttgtcactggccactctgccgaggggccccaagctgactctcaacctgctggactgggtgactcttgtctgtgcagagaggatgtcaccacagaagacactgcttcctcctcccagtcaggccagatgggtcacagccccactaggccatcacctgcaggcgtagccctggctcagctgcccacaccactgtttaccttcactcagaggcacactcctataggtaggctgcttcccacagctagtcagtttcacttcctggttgacacccaaaacaacaacaaagattcacttcctctgaagcctgcactccctagttcattcttgacaccttgctggacacccacagcaggcaaggaaagttcaacagctcccttccatgcctcgtttagagaatcaggtggtgctgggccactgacactgcctctttattggggaggtttaaaaacccgctccacaaatgtttgcaaggtcttctatgtgtcagcttcagtcctgagtgctggggacacaaaggtgaatgagttgtgatatctaccctgacggagcccccaaacaatgaaaagaacccaccatagagggctaagagcactgggggcctaggcagcacagataggtcaccactaagccacctctgaagaggggatggttagagcttagaggggttgtcacagtgggcagggaagtctaactttgcccctctgccttctagtaacctttgggtgcagcgctggggaatggttcaaagcccagggcatagagttctgctgtctagtatggtagcctagctacatgtggcttctgaaatttaaattaaaaattcaggttctcaggcacacaagtggctagttaccctattgaactgtgcagacagaggactttttcatcatcataaagccctgctggacagcactgggtaggggttcacagatctggattccaatcccggctcttctaattagaagtcacgtgactttgaatgagtggctctacctttctgtacctcagttttctcatctgcaaaacgtggatacttacctcaaaggctggtgtgaagatcaaatgagctaattaatgcatgtaacactgtgagagccacagtggccaggtacacagtaagtgctcaataaatggcaattatttttatcatcacaagtccgcggcacctggaagcagatattgtgcttcatgcctctgctcccctcctagtgctgccagcataacaggtgcctggtaaatgcctatgaattccttttccctgcagcagtctcatccaggcccaggctgacacaaatctgtggcagaggcgggagtactcacatctgtagagatggttccacacggggaagaaggccatgtagagcgccacgtcccccactgtcgggtaggacttaaagatggcgatgacagcgatctggataaacatgaagaagatggggtgctccctggggcagggcaggggaaagagagagagagatgagtcagggaccaggcctaccctagagactcctgactccatcctttgaaccaaaaataatcctcaggggacttcaggaaggggctggctctgctatccacaaggcatgggccaggccccagtagcagagcagaaaactgcagggacccagaaatacccagaggtggtgaggagggcctggcaaacactagggaaacagcccacagagacatttcccatcaacagtccccctctgcctctgccagctctgggccttcccctaggagccacagaggaagaaaacaaatgaagtcagcattctttatgactgggcttaaatgactgcttggcaggataattaggcagcctcccttgccagaggcccctctgacaattggacgcaaggcaggaagtgcctccttgctgatgccttttttctctaacaacatggtcagcagggtctacagacccatagtgcgatgaacttctttccaggaagagaactgtgaactgcacagagcttttcagttcttaagggctgggactattcttgttaacttaaactaatagcagtttcaattattattttaacctaataataagtgatagcaatgggtatcctctcctgaactccctctgtgtaaagtccttttcctgcatcctctcacgtgatcctcaccacatctcaaccacccctcaaggcaggcaatcctgggccaggcgcagtggctcacatctgtaatcctagcacttcgggaggctgaggcaggaggatggcttgagcccaggagtttgagaccagcctaggcaacatagtgaaatctcatctctacaaaaaatttaaaaattagccgggtgtggtggcatatggctgtaatctcagctattcaggaggctgaggtgggagggttgctggtgccaggaggttgaggctgcagtgagccatgatcaaccactgcactccagcctggatgacacagtgtgagaccttgtctcaaaaagaaaaaaaaaaagtaggcaatcctctcacctgtacttcacagatgaggaaacagattcagagaagtgcactgactgagtaggttagtaagcgatggagttgtctccagagctcttaatcacgcccaataccattctcctgagtgctgatcacacttccaagctctggtcaggagagagttgggggacagagctcaatctcggtgcccctccgagagctgaccaagtgctaaagggaagccaacagggagaggctggatctataccctcctcagctacatttcaaccacatgcacatggcctacttctgcacagtacctagatgcctagcccatgaaggttttcttcagagattaatgacctttttgtcttgcaggtcaaaggtcagggtgactcaatgggtatgaatctgagatgtgcagacaaacatgtccacacccagaatgctccagtgctgctgtgcagcaagtgcctcagaaacgcagcttggcaaaggcgtgcagccctgtagcctctaagaagcgtccagctatagctcagtgtgaacatcttcctaaacacaatccacatcactggcttcaggcttttcaggtagctggtaacaacggcaacatttctatgaaaaggctggtgaaaatgcggtgacaaaaaaacagactacagcctcctgcagcactgcacagggactggggtggcctgaagggccctgttcctacaaagctggcactggaaacaaatcttgcagggggcaggagagcttaggtagagcttcatacccaggcagaagagaagacagcagggagagcaggtctcttcatattttctgtccccacaactgtgtgggcctggcttaggtcataaaatggtgacattattgcctagccaggagcaatgtgtggctttgcatgcagacaataaaagctgccggagagctggctgcacggccagtgcggaaaggtgccctgggatccctgctcctcttcaccccatggctgggcctaaccggaacaaggacagggaaggtggaccacagacagctggagagctcagctgggcaaggctgccagagttccggagcctgccaggccatggaaggagggtgttctgtcagaagccaggccaaggctgtgtcatgggaaggaagcatcagcttttgagattttacagaatgggaaccacgtgcattggtgcacagaccatggagaatggcaggaaggttaggacagagaacttgagctcttgaaacctaaatcaaactctttcaggttccccagaccatctaggcgtatctgtacctgtctgtgtctgttttcccttatctgaagctaggataatagaaccatttccggaggctactaaaagcaatctctccggagcttggcatggtgcagggggataagcatagattctggagccagacaaacctgagtctaaatcccagctccactgcttactagctgtgtgactgggaaaatcatcccacctctctgagcatcgatttcctcaactataaaatgggagtgataagaatctaacgcctacctccaggagttgctaggttaggtatgattatgtttcagagggtctagaaaggcacctggaatggagcaggcctaacatctatcagctctcttagactgcagaagaggactccacacatcctttggagggaaacagatcaggagattaaacagttgcaggtggccagcctcccaactaaaccatccagagtccctgtggaggacctgtcactgggctgttgatggagacattccaccagatacactttttccaaacacactcccctccacaactcctgttcttttttttttttttttttttttttgagacatgcacttccgcctgtcatccaggcagaagtgcagtggcacaagcagctcgctgaagcctcaaactcccgggctcaagtcatcctcctgcctcagcctcccaagcagctgggactacaggggcacaccaccacacctggctaatttttgttgttgttgttgttgtttttgttgagatggagtcttgctctgtcgcccaggctggagtgcagtggcacaatgttggctcactgtgacctctgcctcctgggttcaagcaattctcctgtctgagcttccagagtagctgggactataggcacccgccactatacctggcaaatttttgtatttttagtagagacagggtttcaccatattggtcaggctgatctccaactcctgacctcaggtgatccactcgccttggcctcccaaagtgctgggattatatgcgtgagccactgcacccaggcagccacctggctaatttttaaattttttgtagatacaggatcttgctatgttgtccaggctggtctcaaactcctggcctcaagtgaccctcctgcctcagcctcctgaagtactgggattacaggtgtgagccaccatgcctggccaccgcctggctctagtccaaaacagtgaatgggctcagcagcaatgtggacttgagcacctcagagtgaggccagggaaaatgctggggctccaaagcaccctcactgcagcctgcacccatgcgactctattgcctgctatggcgctggcaactgcggcaactgaaggcaggttccttaggtgagatgctctaaacctgacagcaggtgctccacatttgaaggccaccctcaaggctactagaggcaggggcttctcggacagctctgtacacacagcagcagcaggtccagccacttactttagctttatggctaaggggatggtgtagaagaagacgttgatctgaaacacacatacaaagaagaggctgaagtgctcaaacatctctgcaaagaagtaccagaaaagaccaatgtttggagtgagatctggaacagaaagtctggaattaagaaaacaaagggagagaaaaaagacaaaagttataaattgtctgctttgaccttgatttctcctgaagactttggtcactgctgggcagccaaggacgactttctccctagagagatcaggatgggaagggctctctaggtaccctggatacaggtaattaacaaaaatgagcagagacatataatgataacccataacaaatattagctaagccaaacaaatctgaaatgaggcagggattcatcctaggaataaagagactcacccctgttttactgcgcaagacagtttaaaatcaggagatacccagtactgtaacaaatgagttttaaaacacaggatctattttgggcattctaaagacctgcctagaggaccacgctcaaagatcctgctcctccccattcttactccacaccccacagcaggagtcagaaaaccgagtgcctgagaccgaagtgagacttctaggggctttaggaacaatcggtgggttctggctaagatccccagggtcccagtcttaattgagaaattagggtttaactggaaaactttttgtccaattaaatcagacaaatatttcgctgcaattctggctctcctaaagtttacatttttgatttaaaaaaatatgaagttgaaactgatctcaatacacaattcaaaaaggacaacaaatagggcacgcagagggagagatgagtgatggctcttggtcagatttccctgactgaggcctccgcccaggttaacttttgcctcttgctgtaactatacctccttttctgggaaatgaggtaaagaacacaatccgtggcccaggagaaagaactcttcacctggcaccgcaactcctatctaaggcagagcatgaagagctgaagttagcaagtcattgttatgctcagccaggatttaacacaaataagcagtccagaattccaaatgggagttctgccactcagatcccttccacacatgcacaggtttaagagtctgtcacctattgggctgtgagctccccaaagcttagggagcaaccgagtcttcggcacctatgcagagcctggcacgcagagggcattcggaaatgtttatagaattcatgaatataaactcagacaagcctgcaatactcaagtccatttgagttttccctcaaggtttgacgtgtggcaggtggcattattttcaaactgtcagaggccctcttgcactagaggaacacatccattcctgtttagaattgagcccaaacctcccagttagaggctggtatttgctttggatgttcccagggagtgctctttaacccacttatgctggaggttgcaaatttttttgtgtgaaaaatcagaccttggcgatgaccttgagcagtaggacgtaaataactcccacaagcttcgtgttccaataatagaacactaggcataaatgggttaatcccaccatatcaaaggtgtgtttcagagtacaggttctcaaagtgtgttccctaaaccagcaggccaacagcactggcatcacctggaaaccggagaaatgcaaattgttgatccctccccaagacctacttaatcagaacctctgagggtgggcccagcaatctgggttttaataagtcctgcaggtgattctgatgcaccttaaggtttgagaaccgctgctatttaatataaaggcttcctgtggtccctcaccctctgagtccagctagagctatgaaaaccaaattagcttccagagttttgtcgggggggttttaactgacaacatatagttgtacgaatttatgggtgattttatgtgatgttatgatttctgaatactatgtagaataattaaatctagctagttaacatttccatcacttcaaatattaaacattgtttgtggtgggaacgattgaaatttactctcttagcaattttggtatatacaatactctattattaactatattcaccacactgtgctagtactcaagaaaagaaaagaaaaaaacatattcctcctgagattttgtacccctttgaccattatctccccattctcccaccctgccggcatcggtaaccacccttctactctctgcttctatgagcgtaattgttttagagtccacatataagtgagaacacatgcggtatttgtctttctgtgcctagctcattccacttagcatcagattctccaattccatccctactactgtcataaatgacagaatttccttttttaagactgaatagtattcccctgtgtatatataccaaattttctttatccatttgtttgttgatggacatttagattgattccataacttggctattatgaataatgctgcaatgaacatgggagtgcagacaaatcttcaacaaactgatttcaaaaattttgagtcacctgcaatcccagcactttgggaggccaaggcagatggatcattgagaccagcctggctaacatggtgaaaccctgtctctactaaaaatacaaaaattagccgggcgtggtggtgcatgcctgtagtcccagctactcggggggctgaggcaggggaatcacttgaaaccaggaggtggagggtgcagtgagcggagatggccccactgcactccagactgggcaacagagcgacaccctgtctcaaaaaaaaaagaaaaaaatcctttaagtaagtagccggaagtgggattgctggatcaaatggtaattctatttttagttgtttgaggaatgttcatacagttttccataatggctgtactaatttacattcttgacaacagtatacaagggttcccttttccccacagcttctagaattttctaacgtggtcattacttacataaagccatagactgcggggatgaaatcccaagagctgagaaggaagaaggagaggcaaatgattaccactaggcttcccacatacatcatggcatactcccaagaaaagatccagaaggctttgctcttcattttcacaggtatgtactgccgctggagagaaggcaaagtgatataaacttagggatgtaaacaacagagggcagctattagcttacacttaaagatccctcccgcaaaaccatactatgatacacaggtttataattttgctttggtctttaattaactaagaaggatgtaagtgttaaaaaggtattacgggtgcatcctctgacctcagacctagtaacaccatttctaggtatgtatcctggagacaagttgcagaagatacaaatggaggaagattcattgcaccattgtttggaatatcaagaaaaaatccttcaatagaggaacaaataaattgtggtatattgacatatggtatactatttgccaggttaaatgaatatattgtatctataaatgtcaacatggctagatctaaaaaatatgaggttagttataatagaaaattgctaaacaagcctattatatgaaaatacttatgtgttctgagattataccaaataatactattatttacacacacacacacacacacacacacacacacacacacacacacatctgtaagtttcataaaacatagattagaaggacatatactaaagttatgatagtattagcctcctgggaaccagagaggaaaatataattggaacctaagaaacttcatataacctggcattcatatgcaaaatgaaaagaaataaacaagtaaaaaaagactttaaaaaaacgccaaatttgggttaaaaaaacttcaactttatctgctttcctttgtttgagacagagtcttgctgtgtcgccaaggtagagtgcagtggcacgatctcggctcactgcaacctctgcctccaggttcaagcaattctcctgcctcagcctcccaagtagctgggactgcaggtgcgcaccaccacacccagttaatttttgtatttttagtagagacggggtttcaccatgttggccaggatggtctccatctcttgacctcgtgaatcacccaccttggcctcccaaagtgctgggattataggcgtgagccactgcacctggctttttttttttttttttttttttttgaaacagagtttcgctcgttgccctggctggagtgctacggcgtgatctcggctcactgcaacctccacctcccgggttcaagggattctcctgcctcaccctcctgagtagctgggactacaggtgcctgccaccacgcccagctaatttttatattttcagtagagacagggtttcaccatgttggccaggctggtctcaaactcccgacctcaggtgatctacccgccttggcctcccaaagtattgggattacaggcatgagccactgcgcctggcctcacatattttattaagtatgacaacagcaattatgaaacaatatagcaaaaatcttaatatctgtttagtttgggcagtagacatatggctatcattatacattttctaaatttttcctctcttaaaaatgttttcctcaaaaaaaaaaaaagatgctgggggaagagaaataatttattgttgtaagaaaaaggaaaataagaattaccagaaaacaaaaaaaccaccccagtatgtgagaaaacagaaatgagtttaaacaaatcacaatcaattcaaatgaacaaaactgtataactaaaaatcatgttgtcagggactgggcatggtggctcatacctgtaatcccagcactttgggaggccgaggcgggaacatcacctgaggccaggagttcaaaaccagcctggctaacatagcaaaaccccatctctaatgaaaatacaaaaattagctgggtgtggtggtgtccgcctgtagtcccagctactcaggagactaaggcatgagaatcacttgaacccaggatgcagaggctgtagtgagccgagattgcaccacggctgcactccagcctgggcaacagagcgagactctgtctcaaataaaatagcgtaacgtaacataacataacataacataacataacataacataacataacataacataacataacacaacaacaaaataaaataacataaatcatgttgttaggaaaaaaatcagttatgcagctacatgctatttacaagagatataccttaaaatataagacacagaggccgggcgcggtagctcatgcctgtaatcccagcactttgggaggctgaggcaagcggatcatgaggtcaggagatcgagaccatcctggctaacatggtgaaaccccgtctctactaaaaatacaaaaattagccaggtgtggtggcaggtgcctgtagtcccagctactcaggaggctgaggcaggagaatggcgtgaacccaggaggcagagcttgcagtgagccgagattgcaccactgcactccagcctgggcgacagagcgagactccgtctcgaaaaaaagagaaaaaaaaatatatatatatatgagacacagaaaagctgaaaatcaaaggactttttcagattgccatggaaacattaagcaaaagaaagctagtgtggttatactattatcagataaaatagacttttatgtaaaaaagtattgcagagataaaaatagtccaataatgataaaaggctccattcattggaaaaatataacagttctaaatttgaatgtaactaataacagtctcaaaatatataaaacaaaagtggattaagctacaaaggaaaaatagacaaatccatcatcaatgcataattgatagatcaagcagacaaattagtaatcaaatagaaaaaatgaagcacatttcacaagtttaatctcataagatcttacaaatcatacttatatagagcagggcacctaataactaagtaattcacattcatttcaagcattttgggggtatttacaaaaacatcacatacttaaatcagtccataaacccacattgacttcaaggaatctttatcatacagacttcaatctctgacgataatggaattaatagaaattattaatgaaaagataacgtaaaataaattagaaaaaaacttgctgacctcacatatgtatcacttatttgttgtgagaacacttaacatctattttcttagtaattttcaagtatacaatatattattaactatagtcatgttgcataataaatctcttgaattgtattataaaaaattaaaacacttttccaaataacctaggagtcaaagagaaatgatgtcagaaaatacctcatattactatttgtgtaatgtagataaaacaatactctgagggaaaagtacagccttagaaatttactttggtaggccggcgtgttggctcacgcctgtaatcccagcactctgggaggccgaagcgggtggatcgcgaggtcaggggatcaaaaccatcctggctaacgtggtgaaactctgactcaactaaaaatacaaaaaaattagccgggcgtggtggttgggcgcctgtagtcccagctactcgggaggctgaggcaggagaatggcgtgaacctgggaggtggagcttgcagtgagccgagatcacgccactgcactcgagcctgggtgacacagcaagactccgtctcaaaaaaaaaaaaaagaaatattaaagaaagttactttggaatagaagaaaaattgaaaataaataagctaaacacccattttaagatattagaaaaaacagaataaaccccaaaagaaggaagaaaataataaagaacagaatttgttaaaacagaaaataaaggtacaatataaggaatcaacaaaaccaaatctagttcttagaaatgactcatgttattgatggctttctaataagaataattaagaaaaaaaaaaaaaagagagacgaacaaataaacaacattagaaatgtaaaagagagcataactatagatgtatcagggaggagaaaatattttaaaacttatgccaatgtattttaaaaaaggtgaaatggaaacattctatgaaaaatataaataatttaaatgattaaaaatgcctgtgtaactaaaaagaagtggagatcaaaggacatgacaatgaaatgtaatacatcctgaaccccatcccttcccccaaatcctataaaggtcacatataaattggggagtttgaatttggagagaatatattggataatgttattctatcaaggttaaatttctaggggtgataacagtatcatggttatataaagaatgcctagttcttaagagttacctgctgaattagggttgatgtgtcttgtctgtaacttccaagcaagtaattcaagggaaaaaagaaaaatcaacatatttacatagatatacataatatggcaaaatgataactgaagaatctttaaaaaggtatttataatattatagtactaaatttttctgaaataatgaaataaaaaattagagaaaaaattaattcacaagaaaatagaaaattggcccaggtgtgatggctcatgtctgtaatcccagcactttgggaaccagaggagggtggatcacttgagctcaggagttcaagaccagcctgagcaacatggcgaaaccccatctctacaacaaatacaaaaattagtagggcatggtggcacatgtctgtagtcccagctactccagaggctgaagtgggaggatagcttgaacccaggaagggaagtgaaggttgcagccaatatcgtgccactgcactctagcctgggcaacagagcgagactctgtcttaaagaaaaaaaaaaaaaagccaccaagccactttacgtagataaaaagttcatatggaaaaacaaacatgcaagaatagctaagaaaacactgattaaaaaaatcatgaagggggactagccttatcagacactgaaatataaaacctctataattaaagcagcgcaatattggctcgttaatagagaagtagactagtagaataaaacagaaagtccagcactagaccaaaatacatatggcaatttagtatatgacagtggtggcatatcactatgataaaaattgactttttaatcaatgatgctaggacaacaaggtaaccatttggaaaaggttgaattagacctatctctcacaccattcacaagaataaactccaaatagcttagggatccaaatatattttttaaatgaaatgataaagcactgtactagaaaaaaacatggtgaacttgtctttaactttgatgtagaaaaaagctcaactgtgattgtgccactgcactccagcctgggggactgagcaagagaccctgcctcaaacaaacaaaaaacaccaggcatggtggctcatgcctgttatcccagcactttgggaggctgaggcaggtggatcacttgagtccaggagttcaagaccagcctgggcaacatagagaaaccctatctcaacaaaaaatacaaaaattagccctatgtggtggtgcacacctatagtcccagctatcagggaggctgaagtgagaggatcacttgagcccaggaggttgaggcttcagtgagctgtgatcgtgccactgcactccagcctgggctgcagagtgagaccctgtctcaaaaaatcaatacaaaacaaaactacatacatacttcaataattccactttctagaaatctatcttgaagatatacctccaacaatatgaaaataagtatatacaaggttactcgctgaaacattacttgtaattgcaaaatattgtaagcaatctaaattcccacacactggagagcggctgaataaactatggtatattcacacaatggcgtactacacagccttaaaaaagaatgaggacaatctctattctatctatactgatatggaggaatttccaggaaataatgttaagtgaaaaaaaggaaagcacaaaagagtatctaaagtatgctacccttcatataagaaaggcatataagaggtgggcaaatcacctgaggtcagcagttcgagaccagcctgaccaacatggtgaaaccccatctctactaaaaatacaaaacttaactgggcgtggtggcaggcgcctgtaatcccagctactcgggaggctggggcaggagaatcacttgaacccgagaggtggaggttgcagtgagccaagatcgtgctattgcactccagcttgggtgacaagagccaaactctgtcgctaaataaataaaggcatacaagaaaatatacatataggctgggcgcagtggctcacgcctgtaatcccagcactttgggaggctgaggcaagcggatcacgaggtcaggagatcaagaccatcctggctaacacggtgaaaccccgtctctactaaaaatacaaaaaattagccgggcatggtggggggcgcctgtagtcctagctactcgggaggccgaggcaggagaatggcatgaacccaggaggcggacggagcttgcagtgagccgagatcgcgccactgcactccagcctgggaaacagagcaagactccgtctcaaaaaaaaaaaaaaaaaaaaaaagaaaagaaaatatacatatatacatgtatctattcactggtgtgtgaaaggaatacaggaaagataagccagaaactaaagagaagacagccctccatatccatgggttccacatctatggattcaatcaactaaggataggaaatattccaaaaaaaattgtgtctgtactgaacatgtagagatgtttttctttcattattccctgaacaatacagtataagaactatttacattgtatgaagtattacaagtaatctggagatgacttaaagcataggagaggatatgcctaggttatatgcaaatactatgccattttgtattagggacttgtacatcctgagattttggtacctgcaggaggtcctggaaccaatccaccacaaataccgagggaagactgtaattacctagggtgagaggggagggactagaagaacaggatagcaggaatgatgacagagtaatactgctctttttgtacagctgactcttagaaccacagtaatattttacattcccttcacttaccccctcctcaaataaacaattaaaatcaaccaatatgtggggagaatccaaaatgaatataaaccctaacaaatgaaactaactatattacaaattaaaaacacaaccacactgaagggttacatggcgcaagaaaagaactaatctaagtaattatgaaaaacaggccaggcacagtggctcatgccttaatcccagcactttgggaggccaaggtgggtggatcacttgaagtcaggagttcaataccagcctggccaactaaaaatacaaaaattagctgggcgtggtagtgctcgcctgtaatccaagctacttggcaggctgaggcaagaggactgcttgagcccagtcgggcgatggagcgagaccctgtctcaaaaacaaaacaaaacaaaaaaagttacagtggagaaacctggcagacactaacgtcaccaagtgatcaaggtaaacattagcattgagaagatatggcaatatcatgaacccctcggtacagtgcactgaggacacaatatgcatttttgccaaaaacatgtaaattcagtccagtcatgagaaaactatgacaatctaaactgaggtacatttcacaaaaataacttcacaagtcatgaatgacaagagaagactgaagaactgtctcagactaggacagactaaggagataaaaccaccaaatgcaatgtgggacctaaatatgatcctgaaacaaacaaaaatagcctcagtagaaaatgcaaaattctaataaggtctgtcgtttagttaataatgctgcataaatatcaatttatttgttcttgataactgtatatggttatataaaatgttaacattagcggaagtggagtgagggatacaagaaactctgtactatttttgcaacttttccgtaggtctaaaattaattcaaaataaaaaacttttaaaaatggagataaaaccatctgttacatggttggttaaaaaaataaacaagcaatttaaaaaattagagcgttctacaaggccagtataaaaaaaaatcagccctttgccttgcctctaatcttcattaaatcaagcttgttattgtgatgttcaaatcgtttacatagttattaaatattttggctgtttaatcttactttgagagatttgttaaaactaattacgatggctgatttatcaatttcttctagctgtgtcaattgttattttctaaattttaaagatatcttattagtcaaatacaagtttgaattctcaaaaacaaagcaaaataaacaaaagacaagcagaacttcacgaagatataccactagaattgccaacattaaaaagatcgataccatcaaatgttagtgaagatgtgtggcaactagactgtcatatttggttgggggggttgtaaaatggtgcaaaaactttgaaaaactgtctagtggattctagcaaagctaaacgtacacttgcccaatgtcccaaaaattctgctaggtactgctcaagagaaacaaaaatgttaagtccacaaaaaaacttgtaccagaatgttcatagtagtctatttgtaacagacaaaaactggaaatgggcccaagtttctaccaataggagaatgggtaaacaaaacgctgcacacacaaaaaacacccagcaataaaaaagaatacatgcaataacatggataaatctcaaaaacaagctggttgaaggaagccttatacaaaataatcctattatttcattccatttatatgatgttttagaataggccaaactaatctatggttaaaacaatattcagaacagttgtgtctgaggaaataggagtgggaattgatggggaaaggacccgaagatactttctgtattttgagaggagtttgggttacacaggtatttgtattaagattcatgcacttcatggtatgtaaattctacctaaaatgaaaaagagtgtaaataaataatgaactccagttgatgcttatgctgaattatttacaaggatatgtatgacatctgcaatttacttcaaaatgtatgaaaaataagactgactgatggatagatggatatgtgataaagcaagtatggtaaaatattaatggaggaatgtaggttataggtatatgagtgttcgtatttgttttttctttgaaatttttcattacagaatgttgggaaaatgtaagatttaatacactgtttagcaagccatacatatgtggtaacactttcaagaaaagccaaagaatgattaacaaaaaattcacggtaggccgggcatggtggctcatgcctgtaatcccagcaatatgggaggctgaggtggtggatcacctgagcccaggagctcgagaccagcctgggcaacatgatgaaaccccatcactatatatttttaaaaatatataaataataacaaattcagggtagtcataacctctgaggtagagggaaggagtgcagtgtagaaggaggacgtacagggcttctaaaggactagaaatgttacattacttaagcagggtagtggaacacagtgttgctttattatgttttaaactatgcaaatattataaagcacaagggcattcaagacagatgggacatcatgggtatgggacctgaggtgggatggaacttgccacactggaggaacagagaaggtctgtgtggtttgagatttaggagtgaggggtaagtggtataagataagcatagagaggtagagaacagccaagtcaaggaggagctaagccattttggtaatatacatctcataggctctttaacagttgagaaaaatgtttcaggtggtgagtgttagcacctcttttacaatcttgtgacaaagaaagcaagttccagaccaaattctagcacacctaaagacatctattaaacagatattccttagtgagccaggcccaaagcagttcacacaaactattctagaagctccatgctgtcccagctctttctgcctctagttattccaaccaccacttatgaaaaaggttcactcataatagaactgacaatatcccagaggcagggttctgttgcccttggagtcacatcaggcaaccagaaatcctaaccaaaggccaaaggatcattaaggaattacgcctcaggcgccatctccaagggaagaagttacaggccctgctagattcatattccttcttcatgcaagcataggaatatttcagggtctcgctttgttgcccaggctggtgcagtgacaggatcatagttcactgcattatttgggccctaactcctgggcccaaataatcctcctacctcagactcccgagtagctggaactacaggcacatgctaccatgcctggctaattttttcattttttgcagagatagggtcttgctctgtagctcataagccaccacatctggcccaattctgcttttgaatacttcaatttcactaatgagcgcctacttctaatactcattttgttaatcagtaagacactaatctcaccagtaaaaattggccaggtgcagtgggccatgcctgtaatcccagcactttgggaggccaaggtgagtagatcacttgaatccaggagcttgagaccagcctgggcaacatggcaaaaccctgtctctacaaaaaatacaaaaattagcaaggcatggtggcacgcgcctgtagtcccagctactcgggaggctgagacaggaggattgcttaagcctaggaagcagaggttgcagtgagctaagatcgtgccattacgctccagcctgggcaacagagacccccgtctcaaaaaaacaaaaaaatccaagctgtttctgacagtcactatgctaactagtaaaggtgttgatcaaactatagagagtgctgcactgatggcagcccctggagagtgcacccttgaagatgtaaagctaggtgacatcatggaatgtggatgcttcattaatgtaattcacattcccctgaagttgaggctgaaactaactggcaaatatatactatcagatggtctatgaagaagtatttttaaataaattacagacatcataactccatgataaagactttaaggatgatggaagtcagcgaagagttttaagctggagacagcattactgttaatagatcttaggtgagaggaatctgaccaacgttatggccccccctgtaagctttacacacatagctctactctgacttctccttgcaactgtactgtcccctagccatatgtggctattctaatataaagtataacttaactaaaactaaaacttcagttcctcagtcccactagcaaatttcaagtgcctgatggccacatgtggcttgtgtcttctgcactgacaatacagacacagaacatttccatggtcacaaaaagttctactgataccgctgatctagaagaataaagtttcaagagaatgataaatttctggggatggaaaataattcaaggccaggcatggtggctcaggcctgtaattccagcactttgggaggccgaggcgggcgggtcacttgaggtcagaagttcgagaccaacctagccaacatggcgaaaccctgtctctactaaaaatacaaaaattagctggacttggtggtgggcatctgtaatcccagctactcgggaggctgaggcaggagagatgcttgaacctgggaggcggaggttgcagtgagccgagatcatgccattgcactccagcctgggcgacagagaaaaaagagaagagaagagaagagagaaaagaaaagaaaaaagagaaaagagaagaaaagaattcaacaaagagaaggcatccatagataaattcaatgaagaaagtatttaggttctgagttaattccttgatcatcttgatcttcctcctgaaaaagactgccatttagcaaagaagggaggaagaaaaaaaagaggaagaaaacagcccaggagagaaaaaaaaaataccctctaaagtaaaaatattgttttgtcttcccattccaccctactgatatttaaaaagaagtatgccagggaataaaacaacaaggccatgaaaaactgaatcaagtaggctgttaaaagcagttattggccgggcacggtggctcacacctataatcccagcactttgggaggctgaggcaggtagatcacctgaggttgggagttcgagaccagcctgacaaacatggagaaaccccgtctctactaaaaatacaaaattagccagacgtggtggcacatgcctgtaatcccagctattcgggaggctaaggcaggaaaattgcttgaacccaggaggtggaggttgcagtgagccgagatggtgccattgcactccagcctgggcaaaaagaacgaaactctgtctcaaaaaagaaaaaaaaaaaaagcagttctcttaggcaagtcctgaacacacactcaggaaatgaggtttcactctttgcaaatcccattagtggcccccaagtttctgtttgctaccatttttctcagtgttttattcgacctaaagtgctctcagtgttagactggaaaatgattttttttcttggcaaacttgtggttacaagatgtgcaataaattttaagtataattctgttttgaagacatggttttggagtcaaggtttgcttggggaacagggccctaaaacgataaagtaatttgaagtatgtactgcatctatttataaaaactgaacttgcacttaatcttgcaggactattccagttacacagtgaggcacatctaaaattcctaaaaaagaaactccagcaatcccctgatggcttgttgtttataaacactagagccaaacttaatctcgaggttgtaaaagttgattatataaattgggtcattcttgtcatgtccaacgaaatcagggccaggggaaagaacacccagggcatacagcacctgctccaagaattagattttccacaagcccagctgctgaaacgacctgctgtgactctaagactactttaacctaccactgtctcaccaatcagagattcccagctcccaaaaacttgacttgtgtcaatgagctttctttcaaagcaatacatactatttctttttctaataaaactcctaaccttctgtttgttctttggacataccaaagaccacccagtctgtgtgtataactcaaattgcaattcttgcttcccaaataaaacattagagatttgtctctatattttatttgacttcaacaaggttcacactgcaaatttcccagtgaacaggtgagatttcatcttacctcttttgctccacagcaaacgctgacttaaaacgtgtatgtaaaatgtatgtatgggctgggtatggtggctcacacctgtaatcccaaaactttggaaggccaaggcgggcagatcacctgaggtcaggagtttaagaccagcctggacaacatggtgaaaacccgtctccattaaaaatacaaaaattagccaggtgtggtggtaggtgcctgtaatcccagctacttgggaggctcaggtgggagaattgcttgaacccgggaggcagaggttgcagtgagccgagactgcgccagtgcactccagcctgggcaacagagcaagactccatcataaaatgaaatgaaataaaataaaatatatgtatggctgggtgcggtggctcacatctgtaatcctagcactttgggaggccgaggtgggcggatgacttgaggtcaggagttcaagaacagcctggccaacatagtgaatccctgtctctactaaaaatacaaaagttagccaggcgtggtggtgggtgcctgtaatcccagctacttgggaggctgaggcaggaaaatcgctttaacctgggaggtggaggttgcagtgagctgagattgtgccacagcactccagcctgggcgacacagcaagactccatcttaaaaaacaaacaaaaaaataaaatgtatgtatgtatgtaagtagaagggttacaagaatgatgccctaaaaactctatcaattttttaaaccattttattacaaacacaaaatgcaggaaattacatagaatataaagcttaatgaatgattgtaaggtgaacatccttataaccactaccaaggtcgagagaaagaactttccaggcattccccaagttcctccatgttccctgatccaaccacaatcccctcctccctccaaagtaatcactaccctggctttggtaataatcacttccttgcatttctttatggttttccacttacatgtgcatccctttctatagtttaggtcttgcctatttttaaaatttttgatacaatttttaagtctcttaattcataattcctccactccagcctactcctgcccatatcttttttttttttcttgttacaattcatatgttacagaatctgggacatttaacccatataacatcccataatctggattttctaattatgtaccttgttttcagtatttcttgcaaattgcagctatatccagaggcttgatcaattttggattttatccttttggcaaactttggtggtgggtaatgttcttttgtcaggaggcttggtttttgtttctgatgtcagcagttattgatgctcagtacctagaccataaggggttgtaaaatgatgctatcctatcattttgttttcatttgtaagttgaaataattttataaagatatatttctgtcacctactatatggttatctagtggtacaggaaaggcaggacaaatacttatttttttcctttatccagttttcaatacaatgaactgatttcttatcaattctcctaatttagccaagtaggtttcctttttagtaacattatgagtgcctggatttaaatatatttatgagttttaatctattgcaattcttaccttactgaaactcaaattatccctctttggtcagtgggagcctcttcaagttagatcctaagtcctttcaagatgactccagtagactttgataaactttcatgttatctgttatcacaacattctaggatcatcctatacatttcctgccctaaaacctagaattagccatttccctaagaaaccccagtttctctaaatgggtaaatggtatttcaagatcataatttgggcactaagaatgttcattcatactgggttggtcattgtttctagaccttttagtggacagacacacacacacacacacacacacacaccacacccctacaggggaccaggcaggtaacaaacaagtgaaggtgagagaaatgaaacagggactgtggcaatctgaagagggtacgctctgcctaaaggggacagatcttacaattcctcaaaaggagccagaaataaaaaatttccacatgaatttttaaaatgctgactactaatttcaaaaaagtcaaacaccagggtcaaatgaaccacatctgtggggccagatgtgatccaagggttatgtgcaccctcaacctgaaaatgttaactcgcagttacaatattccaggagtcacattgttgctaatatataaaaaatatttagggaaattaagaattctcagactgcttcagaaaaaccccagctacattaagattatcttcctctccccaagtctctacagcactagggagaaaagcattttctgtacagaaaccatttcctttctcagacacgatgtgaaagggaaaaagccagttatccaaataaactcttaaagggagttaacctaacaatgtttttacatgtaagttcttggaatcacaagaagagatccaggagatatattttgcatgacagatatattagaggaaacaaaactggtagaaaactttattgaaaatgcttgatcaagctcttgccttcatttttacccattccaaaaagaaacaaagctaacagcactgctacctctgccctagcacacacctggacatagcagaaataacagaaagtgactggggaagaaaaaataaggtgtgaaaactctaaatatggccccagagaaggcttggggaaggacccgttatcaagaaataactgattgagtttggctcctctggtataagctaccatcacataacctgacccaagctccagaaaggataaaaaaaaatcacaggattaacgttttcagttcaaagacaagaaaaggtcagactggattaaagcaaaaccaaaagagtactcacggggtaatttcccctagtgtctgctactgtctttgaaagaaaataaaggcctcaaaccatccaagggaatccaaggctttaggaatcccaagcaaaaggaagatgggaactagaaacttcccagactgcaccatgagcatctcggtaagcctcgcctggtctccctcgaagccttacagcttcagcttctcggtcctgtgcactcggctttccttcactggagcctcctgcccctgagcatgttagggctatttttttccgcatgctatcaaatcataacattttaaacctctctctaatttggaaactaggctctcagccaaggtcagagaaagagttgagttgccggatggaaccagatgggctcaaactaccattctcataagtgattcaccagggagccagatgcagcatcccctccctttgatcttgtgtctcatgaaggaaaggaagaatagtttcacctctggcactgatcagacaccagtactctctagaaattccaccagcagaatggaggcatgtttatagtgtcaaaggaggaagtacaaactaacttttacagttcctttgacttcaaaagatgaattattttcttttcccctcatcgccccacatactggtgatcatgtcctttcatgaacatttgaatactaataatcatagctaatatctatcaagccctcatcagactctgttctaaacacttgacatgtattaaccctttgcagtaggtactattatattatccctgtggaagcagagaagttaaatagtcacttgctcagggtcacagagttaataagtgtccaaatgaagacatcagagcctgtactctatttccctcttttttattataaattttttcaaacatgcagaaaagttggaagagtaatacaataattaaccatatatgtctagattaaatattaataccttgccttattttatctttctgcatgcatatatttatttttgctgaaccatgtaaaagttgaacacatcatgacatttctctccaaaacacttctgcacacagttgtgcaaaataaggacattctcctatataccataatactatcatcacatccaggtaatcaacaattcccagccggcgcagtggctcacacctgtaatcccagcactttgggaggctgaggcgggcggatcacaaggtcaggagatcgagaccatcctggccaacacggtgaaaccccgtctttactaaaaatacaaaaaattagccaggcgtggtggcaggtgcctgtagtcccagctacttgggaggctgaggcaggagaatcgcttgaacctgagaggcggaggttgcagtgagccgagattgcaccactgtactccagcctaggcgacagagtgagactccgtctcaaaaaaaaaaaaaaaaaaaaaattccctaacatcatctaatatctaatctgtcttcaaaattttctagttgtcccccaaaacatcctttatagctgtttttttcaacccaaaatccaatcaagactctcccattgcattcagttattgtgtctctttagtccagaacggtttctccactttttctttttcataacattaacattttgaacagactcagaccagctttcttaaaataccatagtacattctggtttgtcttactgcttccttgtggtgtcattgaactcgttcctctgctcttttattccctaaaaccaaaactcagatcttaaggcttcattaagggtaactttttgggtaagaatagttcagagttgataacgtgtattttgtactgcctcatgccaagcactatatatatcatgtcaagttgttccactataagtgataagagttggattacttagctacagaatatgcctttgtaaagatttttgtttgtttgttttgtttcgtttgtttttgagacagtctcttactctgtcacccaggctggagtgcactggtgtgatctcagctcactgcaacctccgtctcccgggttcaagcaattctctgcctcagcctcctgagtagctgggattacaggcacccaccaccaagcctggctaatttttgtattattagtagagacagggtttcaccaccttggccaggctagtcttgaacaactgacctcgtgatccacccgcctcggcctcccaaagtgttgggattacaggcgtgagccaccatgcccggccataaatatgtatttttccctttgctattagcaaagaatctagagggtggggactagggaataatgttttgacacaatgcaaatgcaaatacattgttctctaaaaaccattcacccagtgattttagcatccatgtgatatgcacaagaggcaggtagaaaagggccgttcctggcgacggccccaccctcaagcctggacccctgacctaaagtgagaacttcacatccctgttgccttttccaaaaccaccctggcctggcctgccccgcatcctgtactcataaaaaccccaggctccactggcagtggagtggcagagagggagagagaagcagcagccagaagtcagagggaagcagcttgatttcagacggacaccttgatggcgggacctcggagaagagttcagccaggaatgaccgaactgaggggaagaccaccttcctgctccatcccctttccagctctccatcccattgacagccactttcatcagcaataaaatcccctgcatttaccatctccaattcatttgtgcaacctgatacctcctggatgccaaacaagaggttgggatacagagggctgtcatactgagatgtgaaatgcttaagccatcagaggatggcaaagctgaaagagcacagtgtaacaaacaacttctgtggctccagggatcatgagtaccccactagacattgctgtgggactgcacagagttgtgcacagagtctgtgccatgggactgcacagagttgtgcccagactggtcttaaactcctgggatcaagtgatcctcctgcctcagcctccctaagtgctgggactataggtgtgagccactgcacccagctataattcctttttaaaaggcagagtaattgcttagttctttccttttaattatttactttcagagtgagaaactggtaaaatagccacatctgatgatggtctatgtattttttctcttcttgcccttttagtgagcatcactatggagacatgacttttttttttttttttttttgagacaagaatcttgcactgtggcccaggctggagtgcagtggtgcgatctcggctcactgcaacctctgcctcccaggttcaagcgattctcgtgcctcagcctcccaagtagctggcattacaggcacccaccaccatgcctggctcattttgtattttcagtagagaaggagtttcaccatgttgtccaggctggtctggaactactgacttcaagtgatccacctgccttggcctcccaaagtgctgggaatataggcgtgagccaccgtgcccagccaaacacatggatttttatccagtgttttataattacttgttgtcattcttttgatgctcagaaattcccaaatttgggtggtatgagcccctttcagctggtaccagtgtttttctgacttagtcctgttaagactttgaggactattttgcttttttttgttgttgtaacaagatgtcccagtcaagctgtgctcttacatactacattagacaacctttcctagagggctatgcctacagagggcttgaaaaaaactcagagaaaaagataatgtcaagagcagatgtgtcagctcctagaggttatcaaatccattttgatttggaagtagaaagcattctgaagccgatcagggtacagccactcactctggcacttacagctttgctacaactccccagcaagtggccattcagcctctggcctaaacaccatgattcacagggaactgacctcacttaggacatctcattctgtcacagaactaccttatactaagcttcttgtaccacctaaccattagttctagcttctctccttggagcctatggatccctgtgaaactcaactctaaagggtccacttagtagtctggcagaaactcagccctaaagaataattttaggctggttgtggtggctcagcctaatcccagcactttgggaggctgaggcgggaggattgctgtagctcaagaattcaagaccagcccgggcaacaaagtgagaccctgtctctaaaaaaaaaccaaccaaccaaccaaacaaacaaaaaacaaaaaacaagccagccatggtggcacatgactgtagtcccagctactcagtaggctgaggcagggggactgcttgaacccaggaggtctaggctgcagtgagccatgttcacagcactgcactccaacctagttgacagagtaagaccctgttacaaaacaaaaaagaatatttcctcttctgtttccaccttcactttttttcaccttttttgttttttttttgtttttgagatagagtctcactctgtcacccaggcttgagtgcagtggcgcaatctcggctcactgcaacctccaccttccgcgttcaagcaattctcttgcctcagcctcctgagtagctaggactgcaggcacatgtcaccatgcctagctaatttttgtacttttagtagagacgcggtttcactatgttggccaggcttgtctcgaactcctaacctcaggtgatccacccaccttggcctcccaaagtgctgggattacagacatgagccattacacctggctcctccttcatatttaaacagatggttttgtttcctggatgtgactacactgatcttcaaataccctaccatgacccacaaggcccaggtgatataatttggctgtgtccccattcaaatctcatcttgaattgttgttcccataatcccctcatgtcatgagagggacccggtgggaggtaattgaatcatggggatggttacccccaatgctgctgttctcctgatagtgagtgagttctcacaggatctgatggttttataagggtcttttccctctttgcttggcacctctccttcctgccatcatgtgaaggtggacgtgtttgcttccccttcggctatatttgtaagtttcctgaggcctccccagccatgtggaactgtgagtcaattaaacctctttcctttgtaaattaccaagtctcaatatcatactgaatggacaaaagctggaagcattccctttgaaaactggcacaagacaaggatgccctctcttaccactcctattcaacatagtattagaagttctggccagagcaatcaggcaagagaaagaaataaagcgtattcaaataggaaaagaggaagtcaaattgtctctgtttgcagatgacatgagtgtatatttagaaaaccccaccgtctcagcccaaaaactccttaagctcataaacaacttcaacaaagtctcaggatacaaaatcaatgtgcaaaaatcacaagcattcctatataccaattatagacaagcaaagcgccaaatcatgagtgaacgcccattcacaattgctacaatgagaataaaatatctaagaatacaacttacaagggatgtgaaggacctcttcaaggaggactgcaaaccactgctcaaggaaataagagaggacacaaacaaatggaaaaaaattccttgttcatggataggaagaatcaatatcatgaaaatggtcatactgcccaaagtaatttatagattcaatgctattcccatcaagctaccattgactttcttcacagaactagaaaaaactactttaaatttcatatggaaccccaaaagagcctgtgtagccaagacaatcctaagcaaaaagaacaaagttggaggcaacaagctacctgacttcaaacgatactgcaaggctacagcacccaaaacagcatgctactgctaccaaaacagagatatagaccaatggaacagaacagaggcctcagaaataataccacacatctacaaccacctgatctttgataaacctgacaaaaacaagcaatggggaaaggattccctatttaataaatggtgctggggaaactggctagccatacgcagaaaacagaaactggacccctttgttacaccttatacaaaaattaactccagatggattaaagacttatacgtaaaacctaaaaccataaaccctagaagaaaacctaggcagtaccattcaggacataggcatgggcaaagacttcatgactaaaacaccaaaagcaattgcaacgaaagccaaaattgacaaatgggatctaattaaactaaagagcttctgcacagcaaaagaaactatcatcagagtgaacaggcaacctacagaatgggagaaaatttttgcaatctatccatctgacaaaggtctaatatccagaatctacaaggaacttaaatttacaagaaaaaaaacaggccaggtgcggtggcttatgcctgtaatctcagcactttgggaggctgaggcaggcagatcatgaggtcaggagattgagaccatcctggctaacatggtgaaaccccgtctctactaaaaatacaaaaaatgagccaggcatggtggcacgtgcctgcagtcccagctacttgggaggctgaggcaggagaatcgcttgaacctgggaggcagaggttgcagtgagctgagattgtgtcactgcactccagcctgggcaacagagcaagactcaagtctcagaaaaaaaaaaaaaaaaagacaaaaaaaaaaaaaccaaacatcaaaaagtgggcaaaggatatgaacagacacttctcaaaagaagagatttatgtggccaagaaacatgaaaaaagctcatcatcactggtcattagagacatgcaaatcaaaaccacaataagataccatctcacgccagctggaatggcgatcattaaagtctggaaaaacagatgctggcaaggatgcggaaaaataggaatgcttttacatttttggtgggaatgtaaattagttcaaccattgtggaagacagtgtggcgattcctcaaggattagagccagaaataccatttgacccagcaatcccattactggatatatacccaaaggattataaagcattctactataaagatatatgcacacgtatgtttactgcagcactacttacaatagcaaagacttagaaccaacccaaatgcccagcaatgagactggataaagaaaatgtggcatatatacaccatggaatactatgcagccataaaaaaggagttcacgtcctttgcagggacatggatgaagctggaaaccatcatccttagcaaactaacacaggaaccgaaaaccaaacatcgcatgttcttactcataagtgggagttgaacaatgggaacacatggacacagggaggtgaacatcacacactggggcctgtcatggggtgggggacaaggtgtgggagagcgttaggacaaatacctaatgcatgtggggcttaaaacctagatgatgggttgatacgtgcagcacaccatggcacattacataggtttgttatacctatgtaacaaacctgcgcattcagcacatgtattccagaacttaaagtaaaatttaaaaaaaaattatttcatgtaccatcagcaaaaacaaataaataaataaataaccaagtctcgggcagttctttttctttccttttcttttttttttttttctttttttgagacagagtgtcacttcatcacccaggctggaatgcggtggtgcgatctaggctcctgcaacctctgcctctcgggttcaagcaatgttcctgcctctgcctcccgagtagctggaattacaggaacactcccccatgtctggctaatttttgtagttttagtagagacaaggtttcgtcatgttggccaggctggtctcaaactcctgacctcaagtggtccacttgcctcagcctcccaaagtactgagattacaggtgtaagctaccacgcctggctcaggcagttcatagcagcgtaagaatggactaatacaccaggctacttcatatatttataaaaaatatacaaatatagtaggaaatggagttttaatttctgcataaatgggatcctgaagttcatctcaaactccttccgctcctgtcccccacatacagacggttaccaagcacagccaattctacctcctagaattcccctgcatctagtctctcatctctccatctcctctgacactggtttgggcccccagtttacccctctgacttgatctagtacaatgttctaagctttcccaacttcagctcttcctactcccatctacccgacaagctgctgccaaagcaatcttcctggagcactcacctgctcagcatccttcaattgctttatgtctgcagtctggcatagtatctagcacactataggtacttagtaaatattggtagaggagctgcttgacttaatgagtcagttgtactgtccactagtgtcaggaggaaatttcctttagttttaaacaaaagttgttttatataaagtggtgcatagagattggcttaagaaaccatttttatcttcttttatttacttattcattttttgcaggttggacaagctcagaaaccatttttaaatttctggtccatccatgtgtatgaatatactatattatttatttgatacatagttgtataaaaagtctggctatatatattcttagtgcttagactttctaaagaataagccataaataggaaataaaaaagaaaatacaagcagcacattgttatgtggaaaaatgcttcaactcagcaagaatacagaaagaaaatcaaagcaaaataacttcactgtatggtgacacatctactgaactggcaatcataaatcaaacttgaaaagtcagtgctggcagatgaggaggtaagtggtccacttctctttagatactgatggtggcactgcaaactggctcaggctttctggtgaacaatctggtataattgcctaataagaacaatacgacttttcaccttgggtccagtgatttagctaaagcaacatacttgaagaaaataatttcaagctgggcacagtggctcacacctgtaatcccagcactttgggaggccaaggcagaaggatcgcttgaacctaggagtttgagagcagcctgagcaacatggcaaagccctgtctctacaaaaaaatacaaaaattagctgggtgtggtggtgcatgcctgcagtcccagttacttgggagggtgaggtgaaaggattgcttgtgcccgggaggttgagggtgcagtgaaccgtgactgcggcactgcacatcccatcctgggcaacagagtgagacactgtctcaaaaataagaaaaagaaaaagaaaacaaataaaaacaaatttctggctgggtgaagtggctcattcctataaacctagcactttgggagaccaaagtgggtgggtggatggattgcgtgaacccaagaattcgagaccagtctgggcaacatggcgaaaccccatctctacaaaaaattagccgggtgtggtggcacacacctgtagtcccagttactcaggagactaaggtgagacgatcgattgagcctgggagatggaggctgcagtgagctgagattgtgccactgcactccagcctgggtgacagagcaaggacctgctctcaaaaaaaaaaaaaaaaaatttctacgttatttatattagtgacaatataaatgacatatctcaaacataaataaagacatatctcaaattccccaaataagaaaaagatcaagcaaaccatgaatcattgtctgcatcaacacaatattataaaatcacttaaaataacatgcatatggcctatttcaataaatggaatacacactcagctttagcagtgcttgtgattaagaaaggctctgaaatcagacatttctggcactgccacctgtacactttcaagaaacatttatcttgtaagaatggatttggaccatgtggggcctgcatgcagttacttcctcttgaagaaacatgtatgtactattctcatttgagtagaacaagatgattagagagcacgctctggcatcagatggccatggttcatatcttagcaatgtcattcgctggtcctgtgaccttaagtgacttaacctcccaacattctagtttcaattcatttgtctaatatggctaacactagactaatatttggctaataatatgacctactccataaagttcttatgaggttaaaatgagacgatgcctacagagtgcttagcatggtgcctgacatgtaatccattctcagtaaatgtcagcaatttgcattcttcaattaatgtttattgatcagccactatgttccaagcattgtttcagatgcacatactccatttaagtcctataagaatcttacaaggtgagtgttattataaagaaaagttaaagaaatgagctcagaggggatcactagttgagaaaagaaaactgcaagatagttgcgtttgcaaatatgtaaaataaaatgcacttatacattcccaaggatatgcatatagtagtgccccccttatctgaggtttcacttttcatggtttcagttacctgttgtcaactgtggtccttaaatggaaaattccagaaacaaacaattcataagttttaaattgtacaccattctgagtagtgtgatgaaatctcacgccgtcctgctctgtcccactcgagacatgaatcacccctttgtctagtgtatccctgcctgttagtcacttagtagttgtctcagttattcgacagaaaaaacatagtatacgtagggttcagtaccaaatgcagtttcaggcctccattaggggctttagaacatatcccctgcagacatggggaggtctactgtagttgggacttaatgataattaagtccactttgtttaaagttagtcaagtttctatgtgtttatattttcaactgggagcaagcttcccactgcctttactaacccgtgcccttcctttcccccagcagggaccaggccatgtattaaatgtcacttgggtgctggcttctgaccagcaagtgcttacctggaggagatagaggagtcctgggacaaacaaggtgagtgggtacagagactggtatgtcgctaaggcaagaaaaatagcactgaggaaagcactgcctgtaaaaagaaagaaatgtatggaataatccagcctcatcaatcatgattagactcagcaagtccctctcaacacaaaactttccataactgctcaaataatcacctgccaagtgcctcctggtacacaaggtgctatgcaaattcacacagtaagagcttcttggcttgatttccaatgaaaggaaaccaagaaagtcaaaaccatctacctttggcaacctgagacactacaggcataattcttataaaattttgagacccagaacgattttacaaaatttcaacccgaagatgtataaagggatcaagtctattaacatccatgtcctatctaatgtaccaatttattaagcctacaattattgcttatgatatccagagctggaaacccatccctttgactgttgcaacattatcactctttacaacagcccttccttacctgctgcatcaatttaggtcacgttttttcttttcaaatgaaagtatattaattttgttagtaatgtcctcacttcctatataaaatggactactatggaatcattaaacatgaggctattaagaatttgcaatgacttagaaaggtgtttataatatcctattaaatgaagtttataaaagagacatatattatcatttattttataaaaaaaaaatgcacaaacattttttaaaagacgaaaagccagcaggcaaagtaactcacgcctataatcccagcacttcgagaggccgagtcaggcagatcaagatcaggagttcgagaccagcctagccaacatggtgaaacctcgtctctactaaaaatacaaacattagccaggcgtagtggtggtgacctgtaatcccagctactcaggaggctgaggcagaagaattgcttgaaactgggaggcagaggttgcagtgagctgagattgtaccacagcactccagcctgggtgtccaggcaaaagtttgcagtagggggcggagccctcatggagaacctctgctagggcaatgcggaagcgaaatgtggggtcggagcccccacacagagtccctactggggcaccacccagtggagctgagaagagggtcactgtcctccagattccagaatggtagatccaccgacagcttgcaccgtgggcctggaaaagccacagacactcaacaccagcctgtgaaagcagctgagagggaggctataccctgcaaagccacaagggtggagctgcccaagaccatgggaacccccctcttacatcagcatgacccagatgtgagacatggagtcaaagaagatcattttggaactttaagatttgtctgccctgctggatttccaacttgcatgaggcctgtagcccctttggtttggccaatttctcctatttgtaacggatgtatttacccaatgcctatacccccattgtatctaggaagtaactaatttgcttttgattttacaggctcacaggcggaaggcacttgccttgtctcagatgagactttgggctgtgcacttttgggttaatgctgaaatgagttaagactttgggggactgttggaagggcatgattggttttgaaatgtgaggacatgagatttggaggggctgaggcagaatgatatggtttggctgtgtcctcacccaaatctcaacttgaattgtatctcccagaattcccatgtaatgtgggagggacccaggggaaggtaattgaatcatgggagttgctggtctttcccatgctattctcgtaatagtgaatgagtctcacaagatctaatggtttatcaggggtttccgcttttgctttttcctcattctctcttgccaccaccatgtaagaaatgccttttgccctccaccatgattgtgagaccttccccagccatgtggaactataagttcaattaaacctctttctttcgtaaattgcccagtctcggactaccaaaaaaaataaaataaataaatagaagactaaaacctaaggccacaaagtttatagtggttatctctgggtagtggaattatgaacaatttttcatttttgcttcactgcattttttaaactttctaaaatgaacatgctttgtttttgtcattagaaaaaagctaatttctttgaaaaaatagctattccctttcagatggcttaagacaacaggatactctaaaactaaggatagagagccctagtttacaacaggagtttccaagtggcccagaaatcagtaggatgcaactgatggtccaagatataaagcccaacaggtgtcttgtaatgatgttttttaaaatgacaatacccatgctcactctcattagtgtggggtcaactatttactgaaaataacaggcggggcatggtggttcacaaatgtaatcccagcactttgaaaggcaaaggtgggaggactgtttgaacccaggagttacagactagcttgggcaacatagtaaaaccccatctctacaaaaataaaaataaaaaaataagctgggtgtggtgttacacacctgtggtcccagctacttaggaggctgaggtgggaggatcacttaagccctagaggttgaggctgcagtgagctaagactgaaccactgcactccagcctgggtgacagagtaagaccctgtttcaaataaaaaaataaaaataacacatcctctcaatggtgtttcataaaaggaggaactagtcactccagtccaaggagttttacccctctgctaatccagctctagagacaaacaggaagagattattgatgagatctttcaccaccaaagtggtctgtatacttgaaacatctaaaaactaccttggaggacagacggttataaatgtgacaatgtcacagacgagagagtggagagaaaagaactttgtgtgctttattcttcaaaccaaggaaactcaccagctagaacaaccctagttgacagaaagtagaagggaggcagagaaagagagaagctagaagtaataggacagaattctatgggaaggggggctgtctcgccatattgacagtgccagtcatgatgtcctgtatccagggtactcataaatatgactgtgtaggaacaggatcacgcccagctaagctgtgacaccagcagtggcaagcacacatctgctgagccacagactctaaactcagaaccaggtcactctgggatagggcagtggcagtagtaggaaaggtgctgttctggagcccaacagctagggtgggctagggattgattctttgattgggtcaaaaatctgaatgattttttggtgggaaactggccaagagagggaaaacactgaaaataactttttaacttaacctggttctctacggattgaaagcaggcgagagaagaggcccatgtgtctgttactagaggatggaggctaatgctccaactccatccattcctatagcatggtgaaaacaaacacatgactttctcctgtctctcccagaggagacacaaggagtgaaatcaacacagccatctcttgccctaattgcctgaggttaataattgcttgtctgaaactgactgtttatgaggcccaagagagaaaaagaggctcacagcctagccaaatggacttgtgagttttagaatacttgctcctaggatcaggaagaagcagtcttccttccatagactgaagtagtctttgggaaggaaaaatctgttcctcctgctattctttgtcagtaactggcatcaacatctagccagataccctggcaacccttcacccttcagctcccatgttcttccttccaccagtcaccaagccctgtggatccacccctggagcatttatcctttcagttcttgctcttgtcatctctctccagcagcttttccccctcctccttagcggtctcccaaccacctcccatccaagtccatctacagaagcaccaaaggaaccttctaaaacagtttagattgtggctagccagtctttaaagacttctgatggttccatttcatctatcaggttaagtctaaactccaacagcaaacaagacccttcaccactgggtctcatttctccagtttcacctctcaccactcttccacacacgccctgtcctccagctacactggactattcccaatttctgaaaacatcatgctgtttcattcttctgtgtctgttcttaggctattccttctgcccaagccatccttctctgcccgctttctagtagaaagcattcgtttgatagccaggtgaaaggtcactttgtctatgagcccaagcaaaggtggtaacaaccgttgattatagttgacatttatggatcacttgctaggtgccaggcactgtactgtatcctctgcatcaagaacagttcctgacttggacaggcgcggtggctcatgcctgtaatcccagcactttgggaggctgaggcgggcggatcacgaggtcgggagatcgagaccatcctgactaacacggtgaaaccctgtttctactaaaaatacaaaaaattagccgggcatggtggtgggagcctatagtcccagctactcgggaggctgaggcaggagaatggcgtgaacccgggaggcagagcttgcagtgagccgagatcgcgccactgcacgcgacacagcaagactccacctaaaaaaaaacaaaaaaaaaacaaaaaaaaaaaaacaaaaaaaacagttcctgactcaaaaaggtcctcaggaaacatcacaacagccctgtgaaagctctatttctgcttcttagaacagctttactgagataaaaaccacacattctacccattttacaggtcaagaaatcaagacagaaacagaaagcttcagtaatgtgaccaaaaccacatagctgactccggtacccactcttaatccctgtgttaataagcctaatactgatgctatcttataataatctgcatatgtttctctctctccccatttctctgtgagtttctcaagggcaacacatttatcttaactttggctctccagcacctagtacagttcctggcacatgtgataaatgaacaaatgaagaaatgaatgaatgaatatcattcagcaatacatatgaaatcctttttaaaaatatgagaatattaaaggaaaccaatgttcttgaggaagaaaaacttatgaagtgtaatacacagagtcatgaacacaggcaaagcacaaaataaatctaactcaaataaagcagagcctgaagaatagtggttgagggtttgttgtggcagagggctggcacagagaatgctctctgtggagtaaactattgcatggctgaggcctgcagtctgggggcagaaacacagtgctgcaacagtcagtaggttggtgtgtgggaagtctgagtgtgggatgctgggacaggtgtggacagggcggacgcacagccggagcaaaagtgagggtgagtatggaggcaggcaggagactcagaaagggctatgtgttttgaaaaaagcttgaaggggtaaaaaggagttaggaaggcagaggaggaatgatatgtgcttggggcagagtcagagaagatcaaggaaagtgagaagtgacttcaaatattttaaacaaactgtgcaataagcaaacatttctggagtttgctctatacgaagagtgtgatgggtgccaggaaacctggtgactcagatagtctctgtcctcagggagctcccagtaaacaattacaaaatacaggaggaaagtacaaaggaagcagacctagcccatcaggggaagctgacacctgagttttgaacaatgagtaggtgaggctgggcagtccaaggctgtgcacaggttggagggcaagagagaatggtgtgctggggtggggctgtgtgtactgtaattagctcaatatagccaaaacagggcaagagctgggaggagtgacaggaaagagaacacaaaaggggctcccgtggatgctggtaccactcttccttaatctgggtgctggttactcaacgtttcgtgaaaattcacgtatctgtacactaatgagttatacatttttccgtatatatgtcatacttcaataaaaagttacaatccggctgggcgtggtggctcacccctgtaatctcagcactttgggaggccgaggagggtggatcacaaggtcaggagttcgagaccagcctggccaatatggtgaagccccatctctactaaaaatacaaaaattagccggatgtggtggcgggcgcatgtagtcccagctattcgggaggctgaggcaggagaatctcttgaacctgagaggtggaggttgcagtgagccgagatcacgccactgcactccagcctgggagacacagcaagagtccgtctcaaaaaaaacaaaaacaaaaaaaaagttacaatccaaaaagtctcagcaagcaggtaggagtcagatcacggagggctaagcttgcacagtcatccaaaaacatctacctacaggcccagacaggatacctgaaatcatgtctgaaatggcagcctcatgtgggcaagagctagggcatcacgctggcctaaccagaaggaactgtgccaagaggactaagagttttaccccaaaatgatataacctaccatttgctagggcagcccagatgcacaggcactaggctttctatataagccttgatatttagccttatcctagggatattagagtaaatcagtcaaatgtgtatgtacattggctgtagtatcaggaaatttcattatctactcaatctagctttgaatatgttatgttttctaactctctatttgtgtcagggtgggggccaaaagcctcagcaagaccgggggtaatactttgcctccagggactgcacctcacagcgatctgggcctgggtgggtggcacagctacaggagtgagcaggaatgtaatgaggtggggccatggggactggttcaggacagggacttcaagtggagtaatcagagaataaagagattgggtcacaggtgatgatctataccaagacaggcagaaacgcactggaatgtagtcaaaagggctcaggtcccacaggactatcagaaaaggaagttgcaccagggtgtggggcaacaagtgagactgcccaggaggaggaggagatcctgggggcagggccaatgtattacattccttgccaagtgtgttcttttaacggggcagcctctctcagagcaatccgtacatatcagtgataacgatgataatttattgagcacttactctgttccagccatgactgtaagcactttacttgccttaagccatttagtcttctcaataattccatgaagtgggtacaattactgtccccattttacagataatgaaactgaaagacagagaagttatttgtctggggtcacgaaactagtgaatgagagcaataggatttaaaccaaatggttttacttcagaccccatgttctgactgcatcactgggccaccctcttgatctcaatcaagcaccataaaaataacaataggcagagcaactagttattgagtggattctgctaaggaagcacgctaagcattttatatttcttatttattcctccactatctctaggaggtagatattctgggatcaaactgaggctcttgaggctgcatgatttgctcaaggctacagagctggtaattagaataagcaggctttgaagttgggttgacctgacaaaaactgagtccttgagtcctctatgactccttccattggcagggctttggcctacaggaacctcaactcgaagtgatgggatcaccaggcctcaggatcatcactcttccattgttcctctaaggctaggctccaggaagagaacctcattgaaacctcccaggtctccctataaggcctataaggatgctaacaatcatgaggtctcttttattttttaattttttttacatggtctcactctgttgcctagattggagctcagtgacgcggtcatagttcactacactcaaactcctgggctcgagtgatctgagggatcttttaaaagggaggatactattaaaaatagcaaccaataccatctgagcagttattacacgcctccataccattcattctttatattcactctataaggcagacactctttcatccccatgctgcagataaggaaactgaggcttagaattgttaagtgacttgcccaaggtgatagagccaggagacagtggagctgggattagccaccagatctgtctaacatgagagcagcctgggctcttaatcatgcttgaataccttctgatagcactgatccttctttctccttggcaagcaagtcctgtcacatggccttttttggtggcataaggaaagctggaagaacccttaggtggcaaacttcaagaatatctcgctgttgacaaacaccaatggtgaaaaagcaggaccatctattagcatctgtttgtctgttttcctttttaaagcctaatgaagactacttcccaaggaaggagtttttaattagctcactgaaaggcagagtacactttgcccaagcaacagccttcaaagcgaaacttaagctgctccactaaactaatatcaacctgcccaaagacctgtgttccccagccaacactacaataaggacatcacaatacaatggcccgaggcttgtcctggcctgcatctctcagagtgtcccaggcaaccctgggctgccacaaaggaagccaggggaaagcaagcagcaagagtcaaggggacaaagcaaacaaggtcactcccttctgtggtgtatctgctccatggaagtctggggagcattgctaagtttacttccactgcccctatcgtcttatcaatcaagttaatttaatttcgtttttaattatgtactcactgaagaaactttggaaaaaaaacatatgaggccgggcgtggtggctcacgcatgtaatcccagcactttgggaggccaaggcgggtggatcacctgaggtcaggagtacaagaccagcctgaccaacatggagaaaccccgtctctactaaaaatgcaaaattcggatgtggtggcgcatgcctgtaatcccagctattcgggaaactgaggcaggagaatcacctgaacccgggaggcagaggttgtggtgagccgagattgtgccattgcactccagcctggggaacaagagcaaaactccatctcaaaaaaaaaaaaaacaaaaaaaaaaaaactacatatctatacgaaaaggaaataaaactcacccatgaacttaatctacaggaacaagtattatccttttgggatctattttctaactatttttgttgctttaacatagttgagattcattaaaatgctgggcacagtggctcacacctgtaagcccagcactttggaaggctgaggcaggtggattgcttgaggcttagagttcaagactagcctggacaacagagcaagatatggtctttacaaaaaacctttaaaattccgagattgcaccactgcactccagcctggacaacagaacaagactctgtctcaaaaaaaaaaaaaaagaaagaaagaaggaaaaaaagaaagaaaaaaacccaactaggcatggtggtgcatgcctgtcgtctcagctacatgggaggatggggtgggaggatcacttgagcctaggagtgtgaagttacagtgagctatgactgtgccactgcacttcagcctgagtggcctgggtgacagagtaagaccctgtctccaaaaaacaaaattagattaaaaaaaatacatatatataatatatatatatatatacacacatacacaattttacattgtttaaaaaaacatttattttcatgtagtttaaaattatatttaaatatcatgtgcataatattctactacatgggtaaaccatattttacttaaccactcctctctaaagtattttctaatttttccagtgattataaataattctgcgattaataactttgtaccataaagctttctgtctttatttctgcattactttaggataggttctcaaaagtagaataaaaatcaaaactacaaacattttatccccaggtggatagtgttagaaaaataaatgaataaaattttttaaaactccaaacttttttttttttttttgagacggagctccgcttttgttgcccaggctggagtgcaatggcgtgatctcggctcactgcaacctccacctcccgggttcaagcgattctcctgcctcagcctcccgagtagttgggattacaggtgcccaccaccacgccctgctaatttttgtatttttagtagagacagggtctcaccatgttggccaggctagtcatgaactcctgacctcgggtgatccacctgcctcggcatcccaaagtgctgggaattacaggcgtgagccaccgcgcctggccaaaaaaactccaaacattttaagactgcccatggttgtacaaatttatcagccaacttccatgtgggagaatatctatttgatagaacatttgccagaactgagaattagcttctaaaatctttaccaatttcagaggcaaaaaacaaaaaaagctttcaaaagtttttaaatttcaatttgccttttctttattaattatccatgagttgaatatttttccataattttcagtgatttatattccttttcttgtgaattttctcaaatattttcttttttaggataaaaagtaaattattccttaattttattaaataattttattaatattatgtggtaaaatgtgaactgtagaaatataacttgcagaagttataactgaactaactatattatatatactgttagcagagattactaaaatactcaaagagctggagtggttcagagacctagctaaaatagaactcttcaaatattttaacagattagaaatgttgtttgtgagggtctctatttatagtagcaaataatggaaaacaaatgtccaacaaaagagaagcgctgggatctcataacaaatacgcaagaggaactgaagtggacatgcagcagagtgatgaaagacttcctttccaatttataggtttgaatttcttttattcttaccaaatgcttaaactacttgcaaaattaaatttaaatttaaaggaaatgacaaatatgtgaccaatgtcagacatgattcatatgaaataagtgataaaagtaaaacaaaattatgtatataacattacgaaaatgtctatgaattcattaaacaaaagtctggagtgatataaaattttttttgctctgtggaacaaaaaaaaaaccatggctgtgaaagagatacatataacttacttacatgtttttcttccccaaacaaaaaccttttcgttgacttacaggtcataaaatatttttttttaatggcatacttttacatttttacgagcgactcctaggaaaacaaataaacatgcaccttctgagggcatgtcttcagtttctctatctttgcactcggctattttaaagatgacatttccaaaggccagtacttggtcccttctgccaggctgctgcgtatattgtttattttaatggacaccagacaccttgataaatgacaacctatctgaacctgacactctggaaacagggattaaggcagggagagttcacagacagcagagtatttactgttaagagttatttctgacaaaatgaccaccacgatcttcagaacaagacaattcaggctatgcaatatctagccattttaagtaatccaataataaattaaactaataggcctacagaaagaccactcataagcattccaagagaaacaatctcttataaagacctaaggcatcctcgggtgccaccccagaaaaggtaggcaaactgtaagtaaaaggttctatgtacaactttttactctttacttcctgagtacacaaactatttaacaatagtgtacaaatataaggactcttacacgcttcttatgggagtataaatgtggcaatacattccagaaatctgactgggtgtggtggttcatgcctgtaatatcagcactcaaggaggtagaggtgggaggacagcttgagcccaggagttcaagaccagcctgggcaacacagtgagaccccattatccacaaaaaggaaaaaaaatcaataaattaattccagaaattgttaaaaagtggcaaatatttctatttctaggacattataagaaaataactaaatatgagtgcaaaaattgctgtacattagaaagttaattgtaatatttaaacagctaaaaactggaaaatcacctaaatatttaatgatacatacattggttaaagaatttctatattcataaaatgaatatgcagccattaaaaatgatagactagaactgggcgcagtggctcacacctgtaaccccagcactttgggaggccaaggcaggcagatcacttgaggtcaggagttcaagaccagcctgaccaacatggtgaaatcttgtctctgctaaaaatgcaaaaattagccgggcatggtggtgcgtgcctgtagtcccagctacttgagaagttgaggcacaagaatcacttgaacccaggaggcagaggttgcaatgaactgagatcatgtcactgcactccaacctgggcgacagagcgagactgtctcaaaaaacaagatagatcagacatttattgatatatgttatatgtagtaggttgtattattggccccaatttccccccaccatgtccaggccctttgctgtataactttgccgtgccttcctgttgtgaacaggatggaaatctccacccctgggctcagccatgtgtaacttttttttttttttttgagatggactctcgctctgtcgcccaggctggattgcagtggcacagtctcagctcactgaaacctctgcctcccaggttcaagcaattctctgcctcagcctcccaagtagctaggattacgggtgcctgtcaccacgcccagctaatttttgtatttttagtagaaatgaggtttcaccatcttggctaggctagtcttgaacttctgacctcatgacctcatgatccacccacctaagcctcccaaagtgctgggattacaggcgtgagccaccatgccgggccatatgttacattttgatcaatgggatattagcacatgtgatgcaaccaggaacttaaaaagtgcatgcctgactaggcttgctcactattgtgcttctgccattgctatgaaaagaaaatacctaagtctgtcccctggcccaagaggatgacaaccatgtggagcagagcccaacctagattagccaactccagccagccactgacgtgaaaatgaagcccatgtaaccagccaactgacaagccatgtccaacctagatcagctgactccttgctgacttacagatgtatgatctaagtaaacacttgttgttgttttaagctactgaattctggaatggtttattaacatttttgtggtactagctaattgatacaagatttaaaagtctggagggaaaaatgttggaaaaatctggaaatatataacccaaatgcttacagaggaacttttagttaaaaataatagattgatcacatgtgtttatcaactctccctccaaaaatctcattaaaatgaaaacaagagattaaaaccatattaaatcacaaagaaaataaggggagattatagcaaaaccaactttaacacaatagtgaaaaaatacaaagcaggtgagagaagaataaatcacttggtgatgtggaagaaattacagctcagtggcctacaaagaggattactaataaaaatcagccaactcaccccacagaacttctgagaaattcagcactagagtgcatcaggtgctatgggaggtgggggtatggcatagagaaaaaaatcaagttgaaagtttatatacagaccactgagaacaacaggtgttaccccaactatgtgcagccaaatgaccattcccgcataacccatccctctaactttctactctacctgcagaagacctcagttctggagaaagctaactaagggcacaagtctaggaactactttgcacagtagtgggctgaggagaggtgtgggctgaaaagcaatgagattaaataaagtctccagactgaaaccagccaccttccctgttcctgctctcacaactccagcagctagtcttatgcaccctccaccccacaaaaaaaccctaactctgctaccccagacaggacttcagaggattcctctttgggaaaactgaatagttgcaaaggaaaataaaacctgcagatgatgacatttgtaaatgcccccgacccaaagaaagaggccagcccactgcctgattccctgtacagtgaaaatgatccaccaacaagccctgcccatgcacggagtctccagtcaatatgttagtgcttcatttaaaatttttttttattattattattttttttacagatggctgtcacccaagctggagtacagtggcacaatcatagctcactgcagcctcaaactcctagactcaagcaatccttctgcctcagcctcctgagtagctgggactataggcaagtaccatcacaccgggctaaattcctttttttgtagagacgaggtctcactatgttgtccaggctggtcttgaactcctggcctcaagcaatcctcccacctcagcctcccaaaatgctgggattatgggtgtgagtcattgtgccaggccatgtctcactcttaaatagaaacagcaaggattaccatacatataagaaaatcatatggaagaaatcctcccaaaacaaacaattaaaaaaaaataccaggaagacaaagagactatgcttggaacaaatagaaactgaaaatatatatgtataatcagagatgtaataaaggatactgtggtgataaaataaaaataggatgcctcaaagaaacaaccagagaccagataaaaatgtataaaaatgtaataaataaaagttaaaactcaatagaggagctggaagataaaaacaaggaaatgtcccagaaaaagtaagagaaagtaagtaaaaatgatgggaaaaacaatagaaaataaaatatgcataacttaatcaatcaagaaaatccaacatccaataaacatccaaaacaagaggacagagaaaacagaggtagaatttggaaaagttgttcaggaacaccctctagaactaaagacactagtttccatattgaaagggcctaccaagtgctcagcataatgaatttaaaaagacgcatgtccagacatagcatcataaaatttcaaaacgctcaggataaaaagaagacacttaatttttcttctcctttttttttttttgagacagagtcttgctctgttgcccaggttggagtgcagtggcgcgatctcgactcactgcaagctccgcctcctgggttcatgccattctcctgcctcagccttctgagtagctgggactacaggtgccagccaccatgtccggctaaccatatatatatatatatatatatatatatatatatatatatatatatatatatatatatatatatttttttttttttttttttttttttttttttagtagagacggggtttcaccgtgttttcttctccttttcttgaggcagggtcttgctctgttgcccaggctacagtgcagtgtcactatcttggctcaatgtagccttaacctcctgggctcaagtgaccctcctgcctcagccacccaagtagctaggactataggcacgtgccaccacacctggctaattttgcttattttttgtaaagatgaggtctcactacgttgcccaggctggtctcaaattcctaggctcaagagatcctcctgcttcagcctcccaaagtgctaggattacaggcttgagccactgtgcctggccagaagatattaaatatttcaggaaaaaaaaactgggttatatccatgaccataaaactgctcaatagctaccaagatactagaagacaatgaagcaatgccttcaaaattctaaaggaaaagttattcgagtctaaaattcttaatcctacccaactattaatttggtgctaaaccagaacaaagatattttttagacatggaataactcaaaatatatatctcatatacccttttttttttttttgagacggagtctcactctgtcgcccatgctggagtgcagtggcacaatcttggctcactgcaacctctgcctcccaggttcaagcaattctctgcctcagcctcccaagtagctgggattacaggtgcccaccaccacgcccagctaattttttgtttttagtagagatggggtttcaccatcttgaccaggctggtcttgaactcctgacctcgtgatctacctgccttggcctcccaaagtgctgggattacaggtgtaagccactgcgcccagccttcatacaccctttcttagacaactactgagaaagtacttcagaaaaacagaaaaaaatcaataaaaaagagaaggaactccaggagaggagggatacagaacaggagatttatgaagttaagttccagtatgacagctttataccaggcccagagaacaaccaggacagactggggtaggataaaagatgtgtgagaaaaatctccagaaaaacaataaaacctataaactatttgatgtgtttaagtgttgttaaaagaaaaaaaaaaaaagaacattgttaggtacttgacagatctagtggagcaaccagggaataaaacagtgattggcacccacaaactaagcaaaaaaccaaacaagcaataaaagacaattattaaccccaggaaaaataaaaggtagtacatggaagaaaaaagtagtcatagttactactttgcccagcagtggaataacacacacagtgttgtaaaatataggtgctgatactgattcaataaaaactatgatgttgaccaggtgtggtggttcatgcttatagtcctggcactttgggaggccaaggagggtggatcgcttaagtccaggaattcgacagcagcctgggcaacatggcaaaaccctgtctctataaaaaatacaaaaattagccaggcatgatggagggtgcttgtagtcctagctacttaggaggctgaagtgggaggatcacctgagctggggaggtcaaggcttccgtgagccatgactgccactgcactctagccctgagtgacagagtgagaccccgtctcaaaaacaaaacaagaaaaaacaaaacaaataaacaagaaaccatggtgtaactactacaggaaaatcaggcaaaggggaaaaggggatattggtaccaaagagctaaatttttttttttttttgagatggagtcttgctctgtcacccaggctggaatgcagtggcgagatctcggctcactgcaacctccacctacctggctcaaaccattcccctgcctcagcctcctgagtagctgggattacaggtgcacaccaccacacccggctaatttttttcctatttttagtagcgatggggtttcaccatgttggcaagactggtcaaactcctgatctcaggcaatccaaccgccttggcctccaagtgctgggattataggagtgagccactgcacctggccccaaagagctaaatctttatcactgtccatgatgggagtgcaacaaataatgtctaaaatttataattcaggaaatataatataaggtcttatttagaaatatggaatactagcaaaagccagaaagtagttgcttcaaagaagttgaactaggggtgggaagaaagaggaaggctgctattctaatcataagccttttagaaccttttttaattttttttaagagataaggtcttactctgtcacccaggctggagtgcagtggcatgatcacagctcactgcagcctcaaacttgcaagctcaagcaatcctcctgcctcagcctcccaagtagttgggactacaggtacatgccactgtgccaggctaatttttttatgttttgcagagacaagctcttgctatgttccccaggctggtcttaatcttctgggctcaagtgatcttcctgcctcagcttcccaaagtgctgagattacaggtatgagccaccacacctggcctagaacttttttgtaaagctatgttaacagtcactgtctgagaagttaagttttcaagatgttttaatttttttctcttgccatgactacattttctaaataatcttgtattacttgtgtaatttttaaaaatgtttttaagtgttgcattaaaaaaaaaacaaaacaaaaccacagcacaagtgttgcaaaatcttgcataaatcagggactgacctttgtactctcctttcagggccttaccttttatcgtagtcaaaatgaagaaagcaatgagggtgttgttgatggcacaggtagacttggcaacacaagacaaaatcgtgtaaggatttaagagatagctggggaagaacaaacatatttggcattagtaatcctgaccaaggagccctcgccattacagcaaggaagttccaagagatttattaaaagcttacgcaaaggaaggcagcttctcagaaatgagttcccccaaataaaagagaatagagtgggggttgaggctgataagtaaaaggtactgaacatggactgcctattctgttctatggagtatatggaaaactgttgtatttaatcatcacagagatcctgtaactcacaataacatcattccagttttgcagatgaggaaacatttgcaggtgacattcaagaagcagctgagtctcaatggtaaagcgacttgcccaaaatctcacaaactaataaatacatccaaaatcaggtctttctagctctataaatgttcattttactatttcagatttcaaaaaatgataaaattctaccaattcccacagagccacatatctcaagaatagctacatttacctctgagaaccaggaaagtacattttcctcagtcaggctcctaagccctgacacaggtcatgccaatccaagagttaaagcagcttagatgtagccttcttggcagttaaacagaatccactgagccagaccccaaggacagaataagtatctactgagctcaacaagtcaagtgttacagaacttcaaaggacatctggaccctcactaggaaggagttaataagctgaaacacctagtgttttcctgagatgggaaggaatgaactgagaaaatgaattcaaaatgtttgtgagtagggaaatcttagatagtcataacaaattgtttgtatttatttctatcctgcttccacaaaggatttgaggcagctaaaatgagaacaagccgggagcagtggctcatgcctgtaatcccagcactttgggaggccgacacaggcagatcacctgaggttgggagtttgagaccagcctgaccaacatggagaaaccctgcctctactaaaaatacaaaattggccaggcgtggtggcacatgcctgtaatcccagctactcgggagcctgaggcaggagaatggcttgaacccgggaggctgaggttgcagtgaaccgagatgacgccattgcactccagcctgggcaacaagagtgaagctcagtctcaaaaaaaaaaaagaacagataataaaaaataggctgggcatggtggctcactcacacctgtaatcccagcactttgggaggccaaggtgggtggatcacttgagctcgagttcgagaccagcctagccaacatggcgagactctgtctctactaaaaaaaaaacataaaaaaacccttagccaggcatggtagtacacacctgtagtcccagatacttgggaggctgaggtgggagaatcacttcagtccaggaggtagaggctacagtgagccgtgactgtaccactgtactccagcctgggtgacagagtgagactccatctcaaaaaaacaaagaacagataataaaaaataatagcaaagtacaaatagaaataaagaatcggccaggagcaataactcatgcctgtaatcccagcactttgggaggccgaggtgggtggatcatttgaggtcaggagttcaagaccagcctggccaacatggtgaaaccccgtctctgctaaaagtacaaaaaaatatccaggcgtggtggcgggtacctgtagtcccagctactcgggaggctgaggcaggagaattgcttgaacccaggaggtagaggttgcagtgagccgagattgcaccactgcactccagcctgggcaacagagcaagactccgtctcaaataaataaataaataatcaagagcaaggaaaacataaataaaaggagacagtaaaggcaatggaaggaccaccaaatggatattctacagcactatagtaatcagctacaaattcggctctgagtttcctggcagagaaagtgaaaaggtagactagttacataattctggttatcagataggaagaaacatgccagtgtctcaggaagagatgatgattactattcacaaataaagaccttaaatccaatacctcccacgactgtgagattagcagttctacagccaaaggcctagaaattgctggcggtttttttcagcaattacagacaggcttgttacataatctttaaagaaacagctgctgctattacaaagctacccccaggacacacataagtccataagagattcataaagttgctaaatttctggttctattaaggtagatcccaccaatatttctgaaatacatagattagaactgatagtccaaaactatttggtgggaagaaaaaaaagccatttctaaatagcaggtgacgttcaagaagcagctgcatagacatctaatagggaataggaaatccacacacaaggcagaaggttgagtaaactagtctcacaaggccccttctaattctgaagttctaagggcgtgtttttccacgaggaaacttgtttgtcttgtttactgtatatccctagaaactggtatattattaatattcaatgactattagtggattgaataattattcacatttgcctatctcaggaagataaatgggaataacccaaaagagtacaacttaatggtagcactgggtacaccctagagaattctttcatagagcctcagtaagttccagtcttccacatgggtcacccagctggaatgcatctgtttggcacttcagttttataagctacaaatggaggactatactgtacacgaaacataagagctgcttgaaatggcagccacataaaaaccaaacttttattcaatccatacatcacaattgaagaactttagaaacactggttataagtaggctggaacccagatcagcatggagtcaaaaagcatttgtgaagggtttgattgtacacagccctgtgtgagtctttgtcccaagagagacagaatggctctgtctcttttgctggccagaacaacagagcccagttgtgcaacagaactacagcaaatacttgatgactaagattgcaaatctccaaaaatacaacaaacaacatgggaaagtctcatcagattttcctcgcatttgttggcactaagcctgttttgtcagggaatacttacaacagggccactttcaaagggatgtaacgcatttccataggggtccggatgagttcggccacatctggggcatactggtccagttctaggaggagtttctgctttttaaactagaaaaaaaaaaaaaaggaaaagataaaacacatgaaacaattcacttcccattgtttttatgctgaagacaaaagtcctttccatggcccacatggccctgcctggtctggccctacctctccaggctcatctcacactcggccctccccatcccctttctgggttccagcaccatgaacatgctgtgtccctccttttcccacacctttgcatttgacctggaataatttcttcttctctttccctagttaactcccacatggtccttatatctcagttaaatcatcatttccttaggaaggcacactttccctcaccaccccacacccaggtaaaatccccctgttatatatgttctttcacatatgttcacagttagtaactttttcacttatttatatgattgactaatgtctgtctccctcattagactaagagttccatgagggcagggaccatgtttatttgcttaccatgtatgcctaacacctggcacagtggacaaacaataaatatctgttgaatggctaaatgaatgacttgctggcaaagcaaagttcatagccatttgaagagttatcatcagtggcctaaagactccaaagttccatccatgaagaagtattgtcaagcaaggtagaatgatcccaaatgtcacaggatcttgggttatgttttacttccacagaggaggcgtagaatggccatgatgatcaagaggaggaaagctgggtgtgggtgggcagctggatagttaatagggagtgggatgggggtggaaagctcttgccttccgctggtgtgtcctaacaagttcatgggtgtgttccagagtgaaagaaaggtaggcaatcttataagcaaacatgggtcagaatatagatgagaaagcctctcaaaccaaaatcggtggccctgttgatttaatgatcaaagaatctcatttagacaatataaaatcaatgctgctatctattagaaaacagtatttcagaggagccaagatagctgtgcttaactgtgaaggattaaaaatttaatgatgtaaaaagcagatcacactagaaaatatactgcattgtgacatttatatgaagttaaaagcatgtaaaataatactatgtgttgggggccaggcatggtggctcatgcctgtaatcccagcactttgggaggccgaggcaggcagatcacaaggtcaggagatcgagaccatcctggctaacatggtgaaaccccgtctctactaaaaatacaaaaaactagctgggcatggtggcgggcacctgtagtcccagctactcgggaggctgaggcaggagaatggcgtgaacccgggaggcggagcttgcagtgagccgagattataccaccgcactccagcctgggcgacagagcaagactccgtctcaaaaaaaataaaaaataatactatgtgttatttagtaacatatataataaaagtcaaggccatgtgtgtggatgataaccactagattcagaacagtggtactgggtaggaggagaaatagggagatgaaagtatgagagagagagagagagctgtaggagtaaatttttttcagcccgaaaataggttcaaaagtatgtactatgctttatctatttttgcatgtcttaggtctttcaaaattaaaaaaaaattaaccaaaaaatatttttagaagaccatctttcagtttaaacttgcacaggtttaggtagaggcttaatctgaaaacctgcaacaaacttcaaaaacctccctttgatcatctctgttcttctcacagttggcagagtccaagttaagcggtgggaattatcagtaagatttatggtgccattcacagctggggttgtttaattaaaaggacaaaatataaaccaaggtgcttttatcacagagaagggggctggctcagcaatcaagtgcttagtgaggacagctgcagcagtggtagcaggaaggaggcctcactagctaagaggtctagagttctgcagcaaaaacaaggccacctggagtgggtgagatccacaaagaaggctgtgagaaaggaatagagttcatccaggggcagccagacagacaggtgggaatgcagacctcattccccaggctggaagccagccagcagggctgcactgagagaaagtggcaactacccgggatgtgtacatcctgggcaaaggtgacactgtgccagcaatggaagtacttccttataaccacaatcttctcaaatactttaaaacagaaagatcttctgaaaggagtctccaggtgggaaggcacacagatcagcaatccccacattctcagctttctagtctccctcaatttcagcagcacaggcactattatggctctcctcataggcccaatatcagctctcctaagtgtagacaaaatcccttttaaaaatccctattgcatccagctagagacaggaaagtggctaaaatcaatggaaatttttaaaattatacacacatgtgcgcacgcgcacacacacacacacacacacacacacacacacacaccccttaagaaaatataagtataaaatgaagttagggtatatattaaaatctgatgatcaatatttctagatacattcattagtcttgacaatgataagatttaaaacaatgacaggagagattaaaagtgatgtgaagggtagtgacctggatatcttacctttgtgatcactaatcagcttgtagacagatggtatgcttttccatatgtaagttatattaaaaaatcaaaatgttttaatttttaaaaatctccagggtagagtcttcctttccttccacccactcctctatacagccctttccttgtcccttgaaagataggttttgccaggacataattcccctacttcaaataaagggctttattttcttggagacagagtcttgctctgtcaccaggatggagtgcagtgttgcgatctcagctcaatgcaacctccgcctcccgggttcaagtgattctcttgcctcagcctcccaagtagctgggattacaggcgcccaccaccgcgcccggctaatttttatatttttagtagagacgggctttcaccacgttgaaactcctgaccaggctggagtttcaccaggctggtcttgaactcctgacctcgtgatctgcctgcctcagcctcccaaagtgttgggattacaggcgtgagccacagcgcccggctataaagggctttttctaatcattgaagctgcatctacgttcatttgcatccccaaaaactatggtggggtcggggagaggaaacactccacccctgtccctactcctctccaactgttagcctcagcacattccaaattcaggagcctagcctccaaatttacaaccctctaatcatattaaggggacacaggtttttatcatccattatcaaaccacctgcagctctcttaacataaattctgagttccaaacaagaagcaccatctcagcaaaggacagactagactaacattgtttttgtcaagtgagatagatgtaaaatgtcatgataaccaactggtcaccatcagcattcagtccgcaggctaacagctggagagggggtgggggtgcagtcccctctctgccctatagttctcccagatgcatctgtgtgtagacatagtttcattaccaaggataaaaagactcaaatcccaccaagatttaaatacttcccagactatgcgatatgaacccttctgacaaagggaagaagatttagaggaagacatgctgctatcctacctaaatcaacagtagtatgttagtatcatcaaaatctgccatttaaaatgagttaatttttgacagagcatacataaaacttctattctgatgaagaaacctaatgttctaatagtctgaactctaaaagtggaaaaacaaaaacattccaaattttacttcagtcttggtaataacagaatgtcttggtgcactaaaaaccagggtattgacaacaccgtttggctttctctctccctctttaaatcatgcaaagaaaaaaacccaaaaatctctatatatttccaaataaactcagcaataacaaacaaattattggtgctctaaattaaaggcatctctcctgttgacattgaagcctgactttgttaggcaattaactgaaacctagtttcattgcttcctcataaactaaccctaccattaaaaactgttttgttttgagacagtgtttcactctgtcactcaggcgggagtgcagtggcatgaccacagctcactgcagccttgacctcccatgctcaagccatccacctgtctcagtctccagagtagctgggcctacaggcacataccaccactcctggctaattttttaaagaattttttgtagagacagggtcccactatattgcccaggctggtcttaagcaaaaaattgttttaactagggagtgtgagaggttttttgatgagaattgagcaggaaaaaaaaaatacatatggcattagcatctaatcaactttcattaaaacacagttcagttttacattttggttataaagatctgggtaattgtggtcttagatgaaagctaccaatcctgcctcagctattcatatctatatcacacatatatatatctcatatatatatatatatatatatatgcacacacacatatctcatatatatatatatatatatgcacacacacaagtttattttttccctagtcttttttttttttttttttttggagattcactttcaaaaagtttcactctgttgcccaggctggagtacagtggcgcgatcttggctcactccaatctccaccacctgggttcaattgattcttatgcctcagcctcccaagtaggtgggattacaggtgcacaccatcacacttggctaatttttgtattattggtagagactgtctacctacccaacctatttcggagaagagaacagtcactgctaatttatatctgaattcctcagcttatgaaacccatgcccaattatttcatctacggccctcaagagaatcctgttaaagcatttcatctcagcccctaaagttttcaagatatgctccattagtttaagatatatactccctggtcttggtgatactaagtccctaaaatatagttcttaattttagaggaagagtcaaagaccacacaccaataacagctatgaactcttggaaacaatgatatacacacacacacatataattctccataccatttccacagttttataggcccattaaggccaagttaagaaccctcagtctagatattttttaaaatctctctggggtctaaaattctagaattcaccagcttcatctgtcactgatgaccagtgacacagaaagcacactgctatttctggtttcattagtaacaaaagctaaaatgaaccacaaacagacaatgccaatgagatgcagccttatttcaccccagcctaaatcttctctctcagtggctcccagccaatcaaggagtgttgtagccatttaactacatgggtagtacacatggttaatctgttaactttctcagaccccaggaaaagaagaatggtcccactatgcaattctccttggctattacatatggattaagactgaagtttatatcaggcatttaatacatgtcaaattttccaattaagattactttctgcagggagacagaaatgacattgagaatccaattttacctcagataggcataacagtgacttaaaagctgtatttatcttcctatgcaaaaaaaaaaaaaaaaaaaaaagactggtgaaagactagaagatttttaagggtcctcattaacgacaggtaatataactgttattcagcactactccagaagtctgaacttgcacaggtatgtggatattaatagttattaataagctacatagatgaagctggcccttctttatctgttagtaaagctgtcttgtgggtttggggttgatcattccagagctggctgaacaggccagaagtttcaccatcacttcctagcactttaaagcatctggatccttaagtataagatctttgtaataacaaagaccagaaggttaccaaattccaccagctttgctccacccacaaactacttaccacaactttattgaagtcctggattgcaaaatacagggcaatagcagtgagtgcatcagttatctgtcaaaagaaagagaaataataggaaatggaacacagtaagtgtaagagtactagagtgctaccagggcttggagttttgagatagtgatggactaccaagtactggactcttacaatcaggtagaacttcaaccctcactttgactacccaaagataaggcccattcaggcagggtgaactggaaatccctgaggatcaggacccatctaggttcacttcagtttagtggcccatatctgctctagaattgcaagatacttatgttttttgtaaaatggaaataatacccactgctttgcatgcctgatgtatgtcaagtgcctagcacacagtaggtcctcaataaatagagtttgttataattactaaggaagacctcagtgggcttcctgggtatttcttgactcaaattttcaatcccagacaagtgtttcaaattgctatgctctcaaaacatagacctgtcatcccaattctgaagcttctcgcccctgaaagcctcaaacctgtgtcctcttcttccataatgactcacagaatctcttggcaaaatgcttaggacaaattcagaatgccctccacgccggcttcacaattaaagccaatcatagaatctcagagctagaaaattcaagactatatatagtccagaaaccaaattctaaaaagagtaagtatttggaactggttacacatcagaaactattcctcacacttccataatactgccacagttccatgaattcaaagtaaagacataagtttttgcttttattttctgagaaactcctgagttcctatgttttttgttttttgtttttttcttaaacacaagatgacaagccgggcactgtgtcatgtgtccatagtcccagcagctgaggaggctgaaatgggaggaccacttaagtccaggagtccaagaccagcctgggcaacacagtgagaccccatctcaaaaaaaaaaaaaaaagagagagagagacaataaaccataaaatttaaaaatatatacatatcaattttatatggaaggttacttaccataaacaccaattcagcatagtcaattaggaaatgaaagaggtatattattaatggagtctgcagaaaaaaaacagacatgtaaaaaaaattaagttaaaccttactattatcagtttccagagtagagagtggggagaaaactattatgtcagcaaactattatgctagtattctccttcctggaatactgttctacgccagctggccggtgtgcttataggggagaataatttagtactgccggaccattttgtgctgctgggactatctgttgaattgagtaaaggaaataaaatctgatgtgttaaataaccattaaagaatagtcaacacactggccaggtgcggtggctcacgcctgtaatcccagcactttgggaggctgaggcaggcagatcaccaggtcaggagatggagaccatcctggctaacacggtaaaacccccgtctctactaaaaatacaaaaaaattagccgggcgtggtggcgggcgcctgtagtcccaactactagggaggctgaggcagaagaatggcgtgaacccaggaggcagagcttgtagtgagccgagatcacgcgactgcactccagcgtgggcaacagagcgagactctgtctcaaaaaaaataaataaataaataaaaaatatatagtcaagacactaaaggtaagaggtgaattgtagttctaagacatatataatagccgaggggaattccacaacagaccaagattgctgattccatttcactcacaaaatgagcttcttctgttctctgataagtttgtataatatttttttctttatttattttcttgagactagttcagaaagattaatgttatttcttcctcaaagatttgggaaaattcactcactgtgaagccatctctgcctggattttctttgagagattttaaatcacagattctatttatttcatagataaaacattcagatttgctgtttttactttgtcaatttaggtaagttgtgtttttccaggaatttgtccatttcatctaaattttcaagcttactgacaaaattgttcatagtatttcattttttattgtttaaagcaataaagtttcctatgagtatggctttagctgtatcacacgagttttgatacgttggatttttttgagatggagtctcgctctgtcacccaggctggagtgcagtggtacgatcttggctcagagcaacctccgcctcctgggttcaagtgattctcctgcctcagcctcccaagtagctgggattacaggcgcctgccaccacgcccagctaatttttgtatttttagtagagactgggtttcaccatgttggccaggctggtctggaactcctaacctcaagtgatccacctggctcagactcccgaactgctggcattacaggcaggagccactgtgcccagccattttcttcaatatcatttagttgaaaatatattctaacttccagtaacatttcttctttgagactactttaaaatgtaccatgttcaatttccaaatacttaggagttttcttttcttttcttttttttttgagacagactctcgcactgttgccagggctggtgtgcagtggctggatctcgcttgctgcaagatcctccacctccagggttcagatgattctcctgcctcagcctccccagtagctaggattacaggtgcctgccaccacacccagctaattttttttgttatttatatatttattttgaggcagagtttcgctcttgttgctcatgctggagtgcaatggcacgatctcagctcatcgcaacctccgcctcccgggttcaagcgattctcctgcctcagccaccacgctgggctaattttgtatttttagtagagatggggtttctccatgttggtcaggctagtcttgaactctcaacctcaggtgatccacccacctcggcctcccaaagtgctgagattacaagtgtgagccaccgtgcccggccgttttttgtttgtttgagacagagtcttgctctgttgctagagtgcagtggcacaatctcggctcactgtaacctccacctcccgggttcaagcgattctcctgcctcagcctcccaagtagctgggattacagccgcgcgccaccacacctggctaatttttgtatttttagtacagacggggtttcaccatctcggccaggctggtctcaaactcctgactttgtgatccacccgcctcggcctcccaaagtgctgggattacaagcgtgagccaccatgcccggcctaatttttttttgtattttttgtattttttgtatttttagtttcactatgttggccaggctggtctcgatctcctgacctcatgatctgcctgcctcggcctcccattctttttatatttttataatttctttctggcttaactctactgtggtaatagaaaatacactatatgactgcaatcatttaaaatgtgttgtgacttgcttaacggtccattatatggtcaactttggtaagtgctgcaggtacattcaaatatgcatattaacacctatggttgcatcattctatatatgacatgtaggctcagtttgctaatgatttgttcaaatcttctacatccttattgatttttttggtctgtttgttctttcactgactgaaagaggtatgttaaaaatctcccagtcaggcacagtggctcatgcctataatctcagcactttgtggggctgaggtgggaggatcacttaagcctaggcatttgagaacagcctggacaacatagtggaaccctgcctctacaaaatatttaaaaaattagctgggtgaggtagcatgcacctgtaatccaagctacttgggaggctgagttgggagaattgcttgagcccagggagattgaggctgcagtgagccttgtttgtaccaccgcactccagcctgggcaacaaagtgagaccctgtctcaaaaaaaaaaaaaaaaaaaaaatcccccactgtgactgccatttttgctttatatattttggagctatgtaattagatgcagttctatgtagaattactatatcttctgggtgcagtgatctttttatcattataaaataatcctcttcatctctagtaaggtttcttgtcttaaaatattcttgatctgatagtatagttacatcagcctctttgggctgtcagcataatacagttttttctgtcattttactttccacctttctgtgtccttatatgcaaaattttttgtttttgtttttggggttttttcctgaaacaaagtctcactctgtcggccaggcaggagtgcagtggcacgatcatgactcactgaagccttgacctcccagactcaggtgacccccctaccttaccctcctgagtaggtgagactacagatgtgcgccaccacacccagataatttttgtattttttgtagagacagagttttgccatgttgcccaagctggtcttgaactcctgggctcaagcaatccgcctgcctcagcctctcaaagtgttaggattacaggcatgagccactgcacctgacctaagatgtgactgattgattgactgattgactgatttagagatggagtctcactctgtccccaggctggagtgcagtggcgcgatctcagctcactgcaacctccgcctcctgggttcaagtaattctcctgcctcagcctcccgagtagctgggactacaggcacgtgccaccacacccagctaattttttatatttttagtagagatggggtttcactgtcttagccaggatggtctcaaactcctgacctcgtgatccgcccgccttggcctcccgaagtgctgggattacaggtgtgagccaccacgcccggtctgttttattttgaacttatgttcaaaattacatatgtttttctttgaccttctcctacttgggtttatagagcttcctgaataaaaatcttagtaaatgttgaaaaaaatttcatccataatctcctcaaatactgattctgcctcgttctgtctcttctcccattctagaactccactgatgtataatttgggctgttttactaagtttcagatctcttactttttttttttttttctgtgttttctatccttttctctccaagtttgaatctaggtattttcaacagactttatcttccatattactaatcttctctttagctttgtgtaatctgctgctaaattcatctatacatttttttttttttttgagacggagtctcgctctgtcacccaggttgaagtgcagtggcgtgatctcggctcactgcaacttccgcctcccaggttcaagtgcccaggttcaagcgattctcccacctcagcctcccgagtagctgggattacaggcgtatgccaccacgcctgcctaatttttatatttttagtagaaacagggtttcaccatgttggctaggctggtcttgaactcctgaccttaagtgatctgcccaccttggcctcccaaagtgttggtattacaggcatgagccactgtgcccggtccatctattacattcttttttttttttttttttgagacggagtctcactctgtcacccaggctggagtgcagtggcgcgatctcggctcactgcaagctccgcctcccaggttcacgccattctcctgcctcagcctcccaagtagcagggactacaggcgcccgccaccatgcctggctacttttttgtatttttggtagagacagggtttcaccgtgttggccaggatggtctcaatctcttgacctcgtgatccgcccgcctcggcctcccaaagtgctgggattacaggcatgagccaccgtgcctggccttacatttttaatttattatgttttctatttctagaatttccgtttgattcattttttacataccctggtgaaattattctgttatttatttcttgaacatattaatcattgatcatagctatttttcttttttgggaggggggaaagggtctcactttgtcacccaggctggagggcaacggcacaatctcagctcactgcaacctccaactcctgggctcaagcgatccttccacctcagcctcccaagtagctggaactacaggcacacaccaccacacccagctagtttttgtatttttggtagatacagggtttcaccatgttggccaggctggttgaattcctggcctcaagtgatctgcccatcttggccttccaaagtgctgggattacaagcgtgagccactgcatccggctgatcacagctattttaaagtccaagtagtttgataacttcaatatctaaatcacctgtaaatctgtttttattgtctatttttttctgtctcttattatgcttggtaatttttttccttttctttttttctctttttttttttttttttttttttttttttttgagaaggagtctcattctgtcatccagtcgggaatgcggtggcgtgatcttggctcactgcaacctctgtctcccaggatcaagtgattctcctgcctcagcctcccgagtagctgggactacaggcatgcaccaccatgcctggctaatttttgtatttttagtagagacagcgtttcactatgttgcttaggttggttttgaactcctgacctcaggtgatccgccagcctcggcctcccaaagtgctgggattacagatgtgagccaccatgcccagccaatggttggtaattttttattgaatgacagacattgtgtatgacaaactacagcagcttggatgaaggtattttcttctggaaaagatttctttaagctggtaattacaatatagttgtttcactttagggattgagctaatttgaagctggatttagtctttgtaaaactagtctatattggtctacccttactcctagagtgtagtccttcagaagttccagcctaaaggcaagtcctttaccagagccttgtcattttggttggtcctgcactccaatttgtatttccccagcaccctgagactgccaatagctctgcttagcttcttggtctctagccagccaatttctgttctgcttctccacctgtgtcacttacaaattggtaaatgcttcaaggacaaagcagctcagactgttcgtattactttttgtactttcccctctgggatcttaatccctggagtcctgcttatcttggtactttccaatgccttccagcagatgtggttttttttttccttttttcatattcatcctgcttttctagttgttcgtggcaggtaggttggtctgctactgcaagcccgttcaccaatccaccagaaccagaagggaagtgcatgacctggttttagcgagcccatgctgatgactgaggagcacctcttcccatcactaaaccatatgcatgaatgtgtcctataacattgagaggttattgacagactttttagtgagaacaagttagcatggtagcaagaacaaagactttggagtcagattcgcatttaaatccaggttccagacagctccggtggctcacacctgcaatcacaacactttaggaggccgaggtgggaggatcacttgaggccaggaggttgagaccatcccgggcaacaaagtgagaccccccccatctctacaaaaaaaaaattagctgggcatgggtagcatctgtagtcccagctatttggtttgtttttattttcgttttttgagtcatgattttactctgttgcctaggctggggtgcagaggtataatcatggctcactgcagcttagaccttccaggatcaagcgatcctcctacctcagcctcctgagtaactacaactacaggcacataccaccacaaccagctaatttatttttccccctggggggagaaacagagtctcactatgttgcccaggctggtcttaaactcctaggctcaagcaatactcccaccttggcctcccaaagtgctaggattacagacatgagccaccgtgcctggcctcagtttgacaaattttgacctatgtatacatccataaaaccattacagtcaagaaagtgaacatatccatcattcccaagtttatcaattttaatgctcatcccaaggaaccatctttgtttcagtgattttcactattagttttgttttctaccctttgtttctactcagatctttattatttcttttaatctgcttactttgagtataattttatcttttcctagtttcttaaggtagaagctgtggttattgacttgaggtcttcttttctaatataagcatttggtgctataagtctctccctaagaactacttagtgacatcccacatattttgatgggttgtgtttcattttcattcatttcaaaatactttctaatttcctttctgatttcttctttgatccatgggttaattaagaatatgttactcagtttctaaatatttggggattctctagatatctttctggtattttttatttaattcaattgtggtcagagaatatattttgtataacttgaatccttctaaacttactgagccttgttttatagaccagaatgtggtctatcttgcaaatgttccgtgtacatttgaaaaaaattatgtgttttgctgttgttggatggagtgttctataaatgacaactaggtcaagttgggttttttttttttttttgagatgaagtctaggtttgtcgcccaggttggagtgcagtggcactatctccgctcactgcaagctccgcctcccaggttcaagccattctcctgcctcagcctcccaagtagctgggattacaggtgcacaacaccacacccagctaatttttctatttttagcagagacggggtttcaccatgttggtcaggctggtctcaaactcctggcctcaatctacccgccttggcctcccaaagtgctgggattacaggcgtgagccaccatgtctgacccaagttggttgttattcaagtcttttatatctttgctgattttatgtctgcttgttctaccaatcattgagaaagggatattgaaatctctgtaattgtggatctatttctccttgtagttctatcagtcttcatatattttgaagctctgtaatttgatacataagcatttagtatcgctatctcttttatcattatgaaatgtattttatctctggtgatacccttggctctgaaatttgtttcttttttttactaacttattgtctgtttctctcagaagtataagcaccatgaagccaggcactgtgtcttgttttgtatccctaacacctagcagagtagctggcacttagtgaatatttaacaaatctttactaaaggaaggacagaagggagggaaggattgtaatgcatatgctgatagaggtaggcactaggaataagtgataagaaggggacagcacctgttttgaagacaatatatcataatgagtaaaataaacacagaggcaatttcaagagtgtgacatgagccaggaaaaggataagcataagattctttggaagactaaggtgatgagagacacctttcttttttttttttgagacggagtctcgctctgtcacccaggctggagtgcagtggcaccatctcggctcactgcaagctccgcctcccgtgttcacgccattctcctgcctcagcctcctgagtagctgggactacagccacctgccaccatgccttgctaattttttgtatttttagtagagacggggtttcgccatattggccaggctggtctcgaactcccgaccttgtgatccgcccgcctaggcttcccaaagtgctgggattacaggcgtgagccaccgtgcccggccctgtgtgcttattaagagtctcttggccgggcacggtggctcacgcctgtaatcctagcactttgggaggccgaggcaggtggatcacctgaggtcaggagttcgagagcagcctggccaaggtggcaaaaccctgtctctactaaaaattcaaaaattagccaggcgtggtggcacacgcctataactccagctacttgggatgctgaggcaggacaatcacttgaatccagggtgggggaagggggagggggttgcagaggttgcaatgagccgagttggcgccacttcactccacctgggcaaaagagcaaaactctgtctcaaaaaaaaaaaaaaaaaagtctctgaagttgttcctaacctgtttctgccagtagttcttgttattgcagtttgattagatattaacccagagataataaaattgaaatgcaaaagacagctgttatttctatgaggaccaagttgaatgcttttgaaagattagacagaagagccaaaaaacaaacaaaaaaaaactgttctcaaagtacatatgagagagataactataaaaattaaggccagccaggaacggtgactcacagctgtaatcccagcactttgggaggccgaggcaggcggatcacaaggtcaggagttcgagaccagcctggccaatatggtgaaaccccgtctccactaaaaatacaaaaattagccaggcatggtggcgcgtgcctgtggtcccagcttctcgggaggctgaggcagaggagtcgcttgaacccgggaggcagaggttgcagtgagctgagattgcaccattgcactccatcctgggcgacagagcgagactctgtctcaaaaaaaaaaaaaaaattaaggccaagcacagtggctcatgcctgtaatcccaacactttcggaggccaaggcaggaggattacttgagtgcaggagttcaagaccagcctgggcaacatagcaagaccccatctctacaaagaaatttttaaaaattagccagctgtggtggtacatgtctgtagtcctagctactcaggaggctgaggtgggaggactgcttgagcccaggaggttgaggctatagtaagccatgatcattccaccacattccagcctcggtgacagagcaagaccctgtctttaaaaaaaaaaaattagaaggtacattgtcaaattagaaaacttctttaaaatgatatggccaataagaacggaaagggcagtgggacgcggtggctcacgcctgtaatcccagcactttgggaggccaaggcaggcggatcacgaagtcaggagtttgagagcatcctggctaatatgatgaaaccccgtctctactaaaaacacaaaaaaaaattagccaggcatagtcacgggcacctgtggtcccagctactccggaggctgaggcaggagaatggcgtgaacccaggaggcagagcttgcagtgagccaagatcgtgccactgcattccagcctgggtgacagagcaagactctgtctcaaaaaaataaaaaagaatggaaagggcagtggaaagaaatgtgatggatgtggtgaggagggtcttcagggctttgtatgcccctctaaggtatctggattttatcctgaggtgaatggtgaacattcaaaggtgccgagcaagacggtgacagaaacagattcacattttagaaagatggctctgactacagaatacagtgaatgagcaagactgaatgcaaaaagacctgtcaggaagctgttgctgtaaacaagagataatctggacctaattaagagtgttttcactattctttttttttttttttttttttttgagatggagtctcgccctgtggcccaggctggagtgcaatggtgcagtctcggctcactgcaaactctgcctcccgggttcaaacaattgtcctgcctcagcctcccaagtagctgggattacaggcacctgccaccatgcccagctattttttgtatgtttagtagagctgggggtttaccacgttggccaggctggtcttgaactcctgacctcgtgatccacttgcgttggcctcccaaagtgctgggattacaggtgtaagccaccgcgcctggcctgtttataattttttttttttttttttttgagacggagtctcgctctgtcacccaggctggagtgcagtggtgcgatctcggctcactgcaagctccacctcccgggttcgcgccattctcctgcctcagcctcccgagtagctgggactacaggcgcccactaccgcgcccagctaatcttttgtattttcagtagagacggggtttcaccgtgttagccaggatggtttcgatttcctgacctcgtgatccgcccacttcggcctcccaaagtgctgggattacaggtatgagccactgcacccggcctgtttttactattcttaagagctaattttaaataaaaattagctgggcatggtggtgcacacttgtggtccctactaaggaggctcaagtaggaggatcgcttgagcccaggaggtcaaggctgcagtgaaccgtgattgtgtcactgcactctagcctgggtgacagaataagaccctgccaaaaaaaaaaaaaaaagctaattttatgggttaagtaagtttttctgggctttctaaggaaacaacattactgccgtagttttcatgggaaatcatattccaaacaacaaattacatgctaattagcatacaacctatttgcggactaaggactgtttgcaacttatttgcctttacaaatggtaacttctacagaagcctcatctgcttccccagttacaatcttaatctggatcatttccattgcaattgcaaaacctctttcttatgcagaggacatctaaaaacgggctgtttctaaatatgatcgtcaagaatacatctttttaaatgtttgtacaaaacagaggttaggctttggtatctgtgactgtaaactactcttggtacccagaaaagaaaataagaacacttacttcatgaaatactgctccagaatacggagatactcccaagtccaacagtgaaaggccttcaaccactgaaaaattagatatacaagttcactcagactaagcaggcagctacagaccaaattgttagatacccccacaaccaaaaagggccttagcgtttatctaaccccctttacctcatccccagcaagtggctttaagtcttgaacatttctgatgacgggaaactctctttcatggacagcatcctttttcattgtgggcagcactcattataagacagttttatgttaaactatctgcttccttttagttccttgtaactcttaccaactctcaaaaatgtctcatttatgcctaatcttccccattccaaagcacaataagataacaaattagaagctggtgagaaatgttgccatagtgtgaggaaatgggcagtcactctcatatgctgctcatttgagtgacatttgtattaacttttcgacagggcaatatgtgctttctaagtgtgtgccttctgacccagatatgatacttcttagggcagtttatcctatggaaataacctgacaagtacccaaagaggtatgttccttacactgttcagagtactgaacaattagaaataatctgaatgtccattaatgaaaatttatttcaatgaattatgacataatatatatctctatataatggaatgctttatacttaaaattatactgtgttataaataataaataacctctccctctccctctccctcaccctctccctctctctctctccacggtctccctctccctctctttccacggtctccctctccctctctttccacggtctccctctgatgccgagccgaagctggactgtactgctgccatctcggctcactgcaacctccctgcctgattctcctgcctcagcctgcccagtgcctgcgattgcaggcgcgcgccgccacgcctgactggttttcgtatttttttggtggagacggggtttcgctgtgttggccgggccggtctccagctcctaaccgcgagtgatccgccaacctcggcctcccgaggtgccgggattgcagacggagtctcgttcactcagtgctcagtggtgcccaggctggagtgcagtggcgtgatctcggctcgctacaacctccacctcccagccacctgccttggcctcccaaagtgccgagattgcagcctctgcccggccgccaccccgtctgggaagtgaggagcatctctgcctggccgcccatcatctgggatgtgaggagcccctctgcctggctgcccagtctggaaagtgaggagcctctctgcccagccgccatcccatctaggaagtgaggagcgtctctgcccggccgcccatcgtctgagatgtgggcagtgcctctgccccaccgccccgtctgggatgtgaggagcgcctctgcccagccgcgaccccatctgggaggtgaggagcgtctctgcccagccgccccgtctgagaagtgaggagaccctctgcctgacaaccgccccgtctgagaagtgaggagcccctccgcccggcagccgccccgtctgagaagtgaggagcccctccgcctggcagccgccccgtctgagaagcgaggagcccctccgcccggcagccaccccgtctgggaagtgaggagcatctccgcccggcagccaccccgtccaggagggaggtgggggtcaacccccgccaggccagccgccccgtccgggagggaggcggaggggtcagccccccgcccagccagccgccccgtccgggaggtgaggggcgcctctgcccggccaccccctactgggaagtgaggagcccctctgcccggccagctgccccgtccgggagggaggtgggggggtcagccccccacccggccagccgccccgtccgggaggtgaggggcgcctctgcccggctgcccctactgggaagtgaggagcccctctgcccggccagccgccccgtccaggagggaggtgggggggtcagccccccgcccggccagccgccccgtccgggagggaggtgggggggtcagccccccgcccggccagccaccccgtccgggagggaggtgggggggtcagccccccgcccggccagccgccccgtccgggaggtgaggggcgcctctgcccggccgcccctactgggaagtgaggagcccctctgcccggccagccgcccggtccgggagggaggtgggggggtcagcccccggcccggccagccgccccgtccgggaggtgaggggcgcctctgcccggctgcccctactgggaagtgaggagcccctctgcccagccaccacccagtcttggaggtgtacccaacagctcattgagaacgggccaggatgacaatggcggttttgtggaatagaaaggggggaaaggtggggaaaagattgagaaatcggatggtggccgtgtctgtatagaaagaagtagacatgggagacttttcattttgttctgtactaagaaaaattattctgccttgggatcctgttgatctgtgaccttacccccaaccccatgctctctgaaacatgtgctgtgtccactcagggttaaatggattaagggcggtgcaagatgtgctttgttaaacagatgcttgaaggcagcatgcttgttaagagtcatcaccactccctaatctcaagtacccagggacacaaacactgcggaaggctgcagggtcctctgcctaggaaaaccagagacctttgttcacttgtttatctgctgaccttccctccactattgtcctatgaccctgccaaatccccctctgcgagaaacacccaagaatgatcaataaaaaaaaaaaaaaaaaaaagaacagctttaaaaaataaataaataataaataaataagtggaagagaaaggagagcttttccctacagagaattctaaggatcaaatgtagaaggaacaaagaaatagaaaatcaccacttggcgtactccatccatagtaataatcacaaaaggcaagaatcatcaatggatgctaaaattagtgggcaaaaatatgagaaacagaatatttgcaaggggaaaaataaaattttacatgggcggtggttcatgcctgtaatcccagcactttgggaggccaaggcaggtggatcacctgaggtcaggcgttcaagaccagcctggccaacatggcaaaaccctgtctccattaaaaatacaaaaattagccaggcatggtggcgcgcacctgtaatcccagctacttgggagagtgaggcaggagaatcgcttgaacctgggaggcggaggttgcaatgagccaagattgtgccactgcactccagcctgggcaacagagtgaaactccttctcaaaaagcaaacaaacaaaaaagcataacctcagtctaactgtgagaagacatcaggcagacccaaatggagacataaaataactggcaagtactcttaaaaatattaagcctatgtacaactactaggtatccataaaaattaaatttaaaaaattgtaaatgttaagtctgaggaagtatcccagattataagagactaaggcgacaaaacaactaagtgcaaagtggaatcacaggttggatattggactagaaatggacattagtggggcaaattgataaaattctaataaggcctgtaattagttaatagcattgtatcaatgttaattttctggtttaggtcattgcactatggtgatgtagaatgttaacattagaaaaaggtgaatgaaaggtaaacaggaactcttgtaacttttttgaaaatctaaaattattttaaaattaagagttaaaattaaaaagtacactagagatctatatttaatgaagaaaagcagcccataaaatattcttaaatgaaaagtaggtcaaaagacagcatataaaatataataggtttttttggtgatttttttaaatgactattttagcaatttctcttggcttttacttattttcctttgcaaattttctgggggttgagggggtacatgtccaggtttgttacatgggtaaattgcatgtcatagaggtttggagtgcagataatctcatcacccaggtaataagcacagtacccgacaggtagcttttccatcttcaccctcctcccaccctccaccctcaagtaggcccaggtatctactgctactttctttgtgtccatgtgtactcagtgtttagcttccacttataagtgagaatatgctgtatttggttttctgttcttgcattaatttgcttaggataatgtctccagctccatccatgttggtgcaaaggacatgagctcattctttttttttttttaatgctgcatagtgttccatggtgtatatgtacattttctttatccagtccaccactgatgggcattcaggttaattccatgtctttgctattgtgaatactgctgtgatgaacatacacatgcatgcatctttagggcagaacaatttctattcctttaggtatatacctagtaatgggattgatgggtcgaatggcagttctgttttaggatctttgagaaatcttcaaactgctttccacggtggctgaattaatttatattcccaccagtcgtgtataagtgtttccttttctccacaaccttgccagcatctattattttttgactttttaataatggtcattctgactggtatgagatagtatctcattgtggttttgagatagtatctcattgtggttttgatttgcatttctctaatgactaattatgttgagcattttttcatatgcttgttggccacatgcatgtcttcttttgagatgtgtctgttcatgtcctgtgcccccccgccaactgtttttccaagacaggttctcgctctattgcccaggttgaagtacagtggcatgatcagggctcactgcagccttgacctctcaggctcaatcgatcctcccacctcagcctctcgagcagttgggacttcaggtgtgcatcaccatgcctggctaatttttgtattttttgtagagatggggtttcaccatgttactcaggctggtctcaaactcctgggctcaagcaatcttcctgcctcagcctcccaaagtgctggaattacagtggtgctggaattacaggtatgagccaccatgcccagccctttgcctttttttttttttttttgagacagagtctcggtctgtcacccaggctggaatgcagtggcttgatcttggctcactgcaacctctgcctcctgggttcaagcaattctcctgcctcagccacccagtagctaggattacaggtgcctgccaccagaccacctaatttttgtatttttagtggagtcggggttttactatgttggccaggctagtcttgaactcctgacctcaagggatctgcctgcctcagcttttcaaaattgcacatttttaaataggtttgtttgtagagttttatcttaaacttttataagcattcatttaattatttgaaagagagagaatgaacatgtactcaatgagaaatgcctggaaaaataaatatttaaatgttcacaatgaccatttctaggtgataagattacagaagatgcttgatttttttcatcttcattttatgaatctttagcaatgaggatgtattattttacaattattcaaaagaagtagtttttgtttttgttttggagacagggtctcgctctgtcatccagactggagtacaggaattacaaacgtggctcactgcagcctcaacctcctgggcacaagcgatcatcccacctcagcctcccaagtagctgagaacacaggccaatgccactacacccagctaaatttttttttggtagagacagtgtcttgccatgttgcgcaggctggtcttgaactcctgggctcaagccatcttcccaccttgacctcccaaagtggtgggattacaggcgtgagccactgcacctagctactttttatttttgaatcatgtgactgagttacctattaaaaaataggtaggcagggattcaaggagttcaagatcagcctgggcaacataaggagaccctgtctctataaaaaaacaaaaattagctggggcatggtgatgtgtgcctgtggtcccagctacttgggaggctgaagtgggaagatcaattgagcccaggaggtcaaagctgcagcgagtcatgatcatgctactgcactccagcctgggtgacagagggaaaccctgtatcaaataaacaaaaacagaaagaaaagaaaagaaaaaagaccactacatatttgtaaggagtgggctataattatgactttaaactttataagactaccctaaagaaggtagggtagtcctataatcaattttataattcatggtggccataaaataaaacaaagcatattgctcaagaccgttgtaactggtccttatactgcaaccaaaaggaaatctcaaggagctgcataaagaggttgctgcgtaatagctattaaatccttcactaacagctttactggagacccaaggagataattcatcaggtcaaatcacaaggcatttctcaatcttagccaatggcatcctaccacagagcagtaaaaaagcaactctacagggcaccagtatgcggccgtccaggcacatcactctccacttgtctggtttaatccagatggaaatttttgagacacagcttgaggacagactgcacaacttttaggcaattgcctaaaatgtaattcatctcagatatgcttttgctagatactgtatatcagtggatttgttagtgtattctctggcaaatgcctggagtgtggctctgctatattgatgattaaatatggcatcatattacttaattgataactgatctgggcaaagggtcagactatgtaaaacatgtaaaacatttttttgtctttcttttttgagactcactctgttgcccgggccggagtgtaatggcttgatcatagctcatcgcagcctcaaccttccaggctcaagtgatcctcccaccccagcctcccaagtagctgggactataggtgcatgccaccacacccagctaatttttaaattttttttgtagaaacgggctcttgctatattgcccaggctggtaaaaacatttttaaaaaccctaccatttactacaatattaaacagttgaccgggcacagtggctcacgcctgtaatcccagcactttgggaggcccaggcgggtggatcacctgaggtcaagcactcaagaccagcctggccaacatggtgaaaccctgtctttactaaaaatacaaaaattagcctatttgggaggctaaggtagaagaatcgcttgaacctgggaggtggaggttgcagtgagacaagattgtgccattgcattccagcctgggcaacaaaagtaaaactccgtctcaaagcataaaaaataaaaaaccaacaaaaaaaagtatatggctgggcatggtggctcacgcctgtaatcccagcactttgagaggccaaggagggtatatcgcttgagctcaggaattcgagactggcctggaaacatggtgaaaccctgtctctaccaaaaatacaaaaaattagccaggcatggtggagagtgcagctactcagcaggctgaggtgggaggattacctgagcccaagagttcaaggctgcagtaagctgtgattgtgccactgcactccagcctgggcgacagagccagaccccgtctcaaaaaaagaaaaaaaaagtataggaagaacataaactcagaatattttttgtttgtttgtttttgagacagtctcacactctgtcgcccacgctagagtgcagtggcatgatcttggctcactgcaaccttcacctcccgggttcaagcaattctcctgcctcagcctcctgagtagctgggattacagatgcacaccaccatgtatggccaatttttttttttttttttttttttttttttgagactgagtctcgctctgtcgcccaggctggagtgcagtggcgcgatctcggctcactgcaagctccgcctcccgggttcacgccattctcctgcctcagcctcccgagtagctgggactacaggcgcccgctaccacgcccggctaattttttgtatttttagtagagacggggtttcaccttgttagccaggatggtctcgatctcctgacctcgtgatccgcccgcctcggcctcccaaagtgctgggattacaggcgtgagccaccgcgcccggcccaattttttttgtatttttagtagaggcggggttttaccatgttggccaggctgatctcacactcctgacttcatgatctgcccgcctcagcctcccaaagtgctgggattacaggcgggagccaccacgcctggcccagaatatttttaatggaatacatttagttttaatgataaacttattactatccttacttttctaattttggtgcacacgattaaaaactgtgacctggtctgcagtgcatttggaaacatctaaggtacatagatgtttcatctatgtacatctaaggcacataaaacatactggtacaagagtaccaacatcctctttaaaatagtgaatctactctccatagaaaagaataatcagggctgtcaaattctaatatatataaaaatgttccaataggctgagcattgtaatctcaatacgttgggaggccgaagtgggtggatcacctgaggtcaggagttcaagaccagcctgaccaatatggtgaaaccccgtctctactaagaatataaaaattagccaggcatggtggcatgcacttgtagtctcagctcctcgggaagctgagacaggagaactgcttgaacccagaatgcggaggttgtagtgagccaagatcgtgccactgtactccagcccgggcgatagaacaagactccatctcaaaaaaaaaagttccagtaatatcatgctgaaaacactttaaagtcagtttcacaaagtgcctattagggggaaaaaacaaaaagacaataaagatacccatagaactcaactttatgcctttctttttcctggagtatcctccaaaaataaaacctgtgaaaatacaccagagcatccaagtaacatttctcacttcatgggactattatctaacaactaatataagagctaaataattatggccaactattgtaaaatgtaagtttttttttttttgataaagactctcaactcttaactgataactaacccatgaagcaagcttatttaattaattaatttatttatttatttatttttagagacaggggccttaatcttttgcccaggctggaatgcagtggcacaatcagctcactgcagccttaacctcccgggctcaagctcagcctcccacgtagctgggactactggagtgcaccactgcacctgactaattctttttttttttttttttttttttttttgagacagagtctcgctctgtcacccaggctggagtgcagtggcgcgatctcggctcactgcaaactccacctcccgggttgacgccattctcctgcctcagcctcccgagtagctgggactccaggcgcctgccaccacgccaggctaattttttttgtatttttagtagagacgaggtttcaccgtattagccaggatggtctcgatctcctgacctcgtgatccacccgcctcggcctcccaaagtgctgggattacaggcgtgagccaccgcgcccagccagcacctgactaattcttattttttgtagagatggggtcctgctatgttgctcaggctggtctcaaactcccggcctcaagcgatctacccaccctggcctcccaaagtgctaagattacaggcatgagccactatgcctggccaataattcttagttaccttggtatacttttcctatgggtgataataaaagcatatcatcctgtataagacaaatattatttttcagtttcccgtatcaataaggacaaaagcttgttcaaaagcagtagtgtccctatacttctagctgagggcctaagaagcagcatcactccagctgcaatgaacacacctagcattcagaactttgtttctaaataacattctctaataaaaggagccagggcccttgaagaagtggtcaattccagggctgaactaagcaagataaacctggatcatcttatagttctagaatgtaataaagtgcttttaaaaaaaaaaagtgagatagaggtatggcaaaaggacaaaggggtcaagatgaaagcggtcccaatggccaaaactagaataatccaaacaacagaatgaatatagtatacagagtccagagtataaaatatccaaatctatactgacataaatagttaaataaatgcaaagaaatgacaactcttccttacagaagaattttaattattaaataaaaatgaatgagagaaacagaaaagtcaccattgaaacacctgagtaatgactgttacaggcaagattaacctatgaatgcaaaaattagtaggcaaaaatttaaaaacaggatatttgcagagctccaaagaatagcccctaaaatgctgattaattacaaagggaaacagtcactttatggtggagaaatctggcagacactacattaaccaagggattatggctgacatcaccagtattagggcatttcaatatgcacccctgatccaatgcactgagaggaccatatcatctcaggggtattcttccccaaaatccattacctccgtcaaaccacaagaaaacattagacaaaaccaaattgagggacattctacaaaatacctgaccagagctcttcaaagtgtcaaggtcataaaagatgaggaaatgctaaggaactatcacagataaacgactaaggagatataacaactaaacgcaatatgtggccaggcgcggtggctcatgcctgtaatcacagcattttgggaggtcgaggcaggtggatcacctgaggtcaggaattcgataccagcctggccagcatggtgaaaccccgtatccactaaaaatacaaagattagctggcatggtggcagggacctataatcccagctactcgggaggctaaggcaggagaatctcctgaatctgggaggtggaggttgcagtgagccgagatctcgccactgcactccagcctgggtgacagagcgagactccgtctcaaaaaaaaaaaaaaaaaaaaaaggggggggcgggcgtgctggctcacacccgtaatcccagcactttggaggctgaagtgggcaaatcatgaggtcaggagatcgaaaccatcctggctaacatggtgaaatcccatctctactaaaaatataagaaattagccaggcgaggtggcgggcacctgtagtcccagctactcgggaggctgaggcaggagaatggcatgaaaccggaaggcggagcttgcagtgaaccaagatcgtgtcactgcactccagcctgggtgacagagcgagactctgactcaaaaaaataaataaataaataaataaaataaaaataaaaatgcaatatggaatattagatcatagaacagaaaaaaaattagtgaaaaaatggtaaaactttttttttttttttttttttttttttttttttacacagggtcttgctctggtgccaggctacatacagtgcagtggcatgatcatagctcaatgcagcttcctcatcccaggctcaagcaatcctcccacttcagcttcccaagtagctgggaccacaggtgtgcgccaccaaaccagctaactcttttttaattttatgtagagagggagtctccctatgttgcccagactggtcataaattccagagctcaaggcatcccctcgcctcagcctcccaaagtgctgagattataggcatagccactgtgcccagcaaaaatggtaaaatcttaacaactatggtttagttaatagtattgtaccaatgctatcatcttagttttgatcactgtactatgactatgtaggatattaacattgggggaagctgggtgaagggtatacagatctctctgcaatatttttgcaagtattctgtaagtttaaaatgatttcaagtaaaaagctaaaaaacaggctggtgcagtgactcatgcctgtaatcccagcactttgggaggcagaggcaggtagatcacttgaggtcaggaattcaagaccagcctgaccaacatggtgaaaccctatctctaccaaaaatacaaaaattagctgggtgtggtggcacacacctgtaatcccagctactcaggaggctgaggcaagagaattgcttgaacccaggaggtggaggttgcagtaggccaagatcacaccactgcactccagcctgggcaacagagtgagactctggctgaaaaaaaaaaaaaaaagtaaaaaacaaaaaacagtggtatctagtctctggatccagctgcctatttgcaggaaatagagatgatagaggaacatgttaaattgtatcatgatatataatcaggaaaattcaaactatgggagatctgtctggattcttcaatagataaacactatggaagagaaagggaacctgggaccctaaaaattaagagagattgaaaacacaaacaaaaacttttttcttaggggcaagactaagcctaacggcaaatgaactagggatgttcatttgagtaataaaacttttaaaaatacaaagatgtcattacatataaaagtcaggataatagttacttatgaaaagagtgaggggattgtgacgaaggggggcttctgaagtgagtggcaaagttctgattcttgacttggatgacagttacaaaaatgttcaccttacaataattcaccatagaatacattgttatgtgtgtcttacaaattctgtttaattttgtaataacggctttttttttttttttgagacaaagtcttgctctattgcccaggctggagtgcagtggcatgatctcagctcactgcaacctccacctcctgagttcaagtgattctcctgcctcagcctcctgagtagctgggactacaggctcctgccaccacacccagctaatttttgtatttttagtagagacaaggtttcaccatgttgcctaggccggtctcgaactcaagctcaagcaatctacccacctcccaccttagcctcccaaagtgctgggattacaggtgtgagccacctcgcctggccataaaggcttttttaagtagtggtatcagaagtgctcttcctgaccctgattcttttatttttgagacaaggtcttgttctgtcgcccaggctggagtgcagtggtgcaatcttggctcactgcagcctccacctcctgggctcaagccaccctcccacctcagtctcccaggtagctgggactacaggcacacgccaccatacccacctaatttttgtatttcttttttgtagaggtggggtttcaccatgttatccaggctggtctcaaactcctaagctcaagtgatctgcccacctcagcctgccaaagtgctgggattacaggcttgagccaccatgcccagcaaccctgattctcatagctgtagtaggggtgggtttctagataagtactaatagcttgggctctaccctgaactcaaaaagctaagcctatacgaactgtcaatctttgggtgaaagcctcaggaaagactaaaacatggcagaaagtttctaacattattcctgacagatatctaaacaagatgatactggtggaacagccatacctaaagattgctagctcttcatacaaaatattattagcgaggtcaccttgggcaaatgacttaatctctccatgcctcaattttctcatttataaaatggggttgataacagtttgccattttagagatcaaattagtgcattaacacacctaaagtgcttagaacaataccaggcatgtaaaaagcatcatatcattgttaatttctttcttttcttcttcctttttttttgagacggagttttgctcgttgcccaggctggagtgcaatggcgcgatctcggctcaccgcaacctctgccccccgggttcaagtgattctcctgcctcaacctcccaagtagctgggattacagtcatgcaccaccacgtccggctaattttgtatttttttagtagagacagggtttctccatgtcggtcaggctagtcccgaactcctgacctcaggtgatccacccacctcggcctcccaagtgctgggattacaggcgttagccaccgtgcccagcctgttaatttcttattaattttttagaagctcctgcttttgtcaaacaggaaattcattccttaaaaatttatttcttggccgggcgcagtggctcacacctgtaatccaccactttgggaggccaaggcaggtggatcacctgagatcaggagtttgagaccagactgactaacatggtgaaaccccatctctactaaaaacacaaaattagccaggtgtggtggctcatgcctgtaatctcagctactcaggaggctaagacaggagaatgaatcgtttgaacctgagaggcagaggtttcagtgagctgagattgtgccattgcactccagccagggcaacaagagtgaaactccttctcaaaaaaaaaaaaattttctttttttataaggcagagtctcactctgtcacctaggatggaatgcagtggcacgatctcggctcactgcaccctccacctctgcctcccgggcccatgcaatcctcctgccttagcgtcccgagtagctgagactacaggtatgggccaaacatgtccagctaatttttgtatttttttgtagagacagagttttgccatgttgcccaggctggtctcaaactcctgggctcaagtgatcctcccgcctcggcctcccaaagtgctgggattacaggcatgagccacaaaacccggcctggaaatttatatgtattttagttacactatcaaataaaccgatggatttgtagaaataggtaacagaaaagatatttttcctgttgaaatggatatgttatttgtgcctgcccaacatcaatcttcccttcttttggtaacagcaccctaatttttcctatgggataccccccttgtgtacattttgggtgagactgcctcctttccaaagaggtagatacatgacccaggcagactacagtaattgaccgaagaattggtatatgacccaaatcagttcaatgtgacttaattccagagctttcgttgcacttattcaaaaaaaaagaggtcaggcatggtggctcatgcctataatcccagcactttgggaggccaaggcagaaggatcgcttgaggccaggagcttaagaccagcctaggcaatatattgagaccccatctctacaaaaaacaataaaaaacaattagcaaagtgtgggagcatgcaccaatcccagctgtttgggaggctgagtcaagaggatctcttgagcccagaaggatgaggctgcagagaattatgatcatgccgctgcactccagcctgggagacagagtgggaccctgtctctcaaaaaaaaaaaaaaaaaaaaaaaatcagtccatactatagccaatcaaaatctatttggatttggatccagggcccctttacccaaagaactgatcattcaaaaatttaaaatgtcagcccggcgtggtggctcacgcctgtcatcccagcactttggaaggccgaggcgggtggatcacgaggtcaggagatcgagaccatcctggctaacatggtgaaaccccgtctctactaaaaatacaaaaaattaaccgggtgtggtggcgggtgcctgtagtcccagctactcgggaggctgaggcaggagaatggcgtaaacccgggaggcggagcttgcagtgagctgagattgcaccactgcactccagcctgggtgacagagtgagactccgtctcaaaaaaaaaaaaaaaaaaaatgtaaaatgtcatgtgaaaccagaaggagtcctactttactatttttaaattcctgccttttagggtttatataatcagctgctttaaaaaatatcccatttaaggtaccctttgaagaaaagtaatgcttacagatgttgtaccttccctcccaaatgatacaaataatcatgctgatttagtcagatccagatgatgggtggttaacaaatctctctctctttctagtcctgacactggcctcaagctccagacctaaacctgtcagtattgtactatcacattatacacacatgaaacactactatgtcctttctgattcatctatttcagcccatgtcagcactatttttcctaatatctcaactcaaaaccttagaattcacctttttggctttcattattgtgttgagcttcaacatggattatctcgttgaacaggatacataatttcctattttacagatggaaacactgacgttagaattcatacagcttggccgggcgtggtggctcacgcctgtaatcccagcactttgggaggccaaggcgggcggatcacgaggtcaggagatcaagaccagcctggctaatatggtgaaacctcgtgtctactaaaaatacaaaaattagccaggcatggtggcatgtgcctgtagtcccagctacttgggaggctgaggcagaagaatcgcttgaacctgggaggcagaggttgcagtgagccaagatcatgccactacactccagcctgggcaacagactgagactccatctcaaaaacaacaacaacaaaaaaagcttggcgcagtggctcatgcctgtaatcccagcactttcacaggtcaaggcgggcggctcacctgaggtcaggagtttaagaccagactagccaacatggtgaaacttatctctactaaaaatacaaaaattagctgggcatggtggcgggcacctgtaatcccagctacccaagaggctgagacgagataacagcctgaacctgggaggcggaggttgcagtgagccgagatcgcgccattgcactccagcctgggcaacaagagcaaaattctgtctcaaaaaaaaaaagaattcatacagcttataagttgcagaactagagaaagagtcaaaccttttctgagattccagaccctgcactcttaattaccaaacaacactgtctcatctttggatccttcacctgtccatcctgtaagtaacctcctgtaagtaaccagatcctatgctttcttctcttccacatttattcaacagtaactacacacctactgtatgccagacataaaagaattcaggaatgaataaaacagaatccttcaaggagctcataatatagtggaaaaggccaggtgtggtagcttatgcctgtaatcccagcactttgagagacccagatgggcggatcacttgagcccaggagtttgagaccagcctaagcaacatggtgaaaccccatctctacaaaaaatacaaaaaaataataataataacaagtagggttggtggtacatgcctgtagtcccagctaccaactacttgggaggctgaggagggaggatgtcctgagcccgagaggtcaaggctgcagtgacccattatcactgcactccagcctgagtgtcagagtgagaccctgtctcttgaagaaaaaaaaaaaaaaaaagaggccaggcatggcggctcacacctgtaatcccagcactttgggaggccgaggaaggcagatcacctgaggtcgggagttcaagaccagcctgaccaacatggagaacccctgtctctactaaaaatacaaaattagccaggcatggtggtgcatgcctgtaatcccagctgcccaggaggctgaggcagaagaattgcttgaacccagggggcggaggttatggtgagccgagatcgcaccattgcactccagctagggcaatgagagtgaaactccatctcaaaaaaaaaaaaaaaaaaaaagagagagagagaaaatgtggaaaaaccggatataaacaggtaattatgagataagaaatgctcttagtagggtgtagaggaagaagggcctaatactgcctcaggttttcagttatccagaagaaaacaggaaccaaatggcttcgattcatttcaacagaaaaataatacgcagaggtaacaaatccaagctcttacaatctcagacatgaattattactatctttattaccattccccaactaggaaacctgggcaaattaacttctctaaatttcagttccctcatctgtaaaagggggaaaataacaccatctatcacatagaaataaatgtgaggactaaatgagaaaaggtatatgttaccatttttagaaaccttaactctattcataaaacacccattcattatgccgttccccataccaacattctatgggataacatcaaaacgttagccttggccaggtgccatggctcacgcctgaaatcccagcactttgggaggccaagtgagactgcttgagtccaggagttccagaccagcctgggcaacatagaaagaccctgtctctaaacaaaaaacaaaaacaaaaacaaaaaaactttagcatttaaaggacacaaaggggacttctggggtgctgatactgtttcttgaactaggtgctggctacatgagtgaatacagtttttaaaaattcattgaactctacacttacttaatatgcattgtatgtatactgtacttcagtaaaaaaaaaaaaaaaaaagttgtttgtttttttttaatcatcaaactctggcctaaacctagcttccaccccattactcccctgctttggacatttcacatccttgaacgtttcttcatcctatttactttctgctacctggaactctccttttctctaatctccctttcaaaaccctacatccttcaagagtcagctcaaatcccacattctggaaaactggaaaggtaggggatagtttattcagggtcagaatactaaggaaggaactgggtggacacataaagtatacttttcatgaattattataacgatttgtctccctcactagcctgtgcagctacttcaggccaacttcgctttctcgctgtaggcgttagtataaaacaatgttcggtgaagaacttagtaaggaacagtaacaaaaattgccctgcaagtcccagactgagaagagacgtctaaagcacacgcacactctcctcgcttaagcaaaattggtcccctcatcccggaccccctcacacataaccttttatcccagggagcacccctggcgatcccgccccaaatcccaaactcctctgcaagccgcgctccacaagcacctcctcctcttattccaacccttcccacagaccacactcctcggctcaggacactgaatgggacacgccccctcagatccccaccactaggtggtccggcccccagggcccaaacctcacgacactgtccccacgccccggtccccacgccccctcccctcaccagccccgccctcaggccccgccctctccaagaaccccacgagacagtcagttagttctctaggaaccgcgcgctggcggtcactgcccccgcctcccattcacagaggccgcgggagggcaggtggggcctgacagtctgctcgagccagtggcctcacctctcttccaagagctcagtggggacaccacctccacccgctcggaaatgaactcggccagactggagcggaacaaggccgcccgcactgtcacagccaccaccagcaccaggaccaagggagccgccatgataactggggcgggcgcgcgggcggggagggaaggcgaggcggaggagcctcgcgcgctgtgcgccacgctctgtagttccgcgggtgggcgcgcgctgccgctggcgccggagaggccagacgtggggactacggctcccagaaagccttgcggcgaggcgggccggagcgacggaaagcgggcgcctcaagctgcgtatgcagaaggtggggcgaaaccttctacgatcgcaggtgttttgtgaagccgcgccgctatagcggggctgaaacgctgctgaaagtagaagcggaagtagtcgccttcctgggattgtgagagacttttaaacagatgttaaattcactcttgcgtgtatgttttcaatgccaaaatgtttatttttatttttatttttattttttttgagacggagtctcgctctgtcgtccggctggagtgcagtggcgcgatcttggctcactgcaacttccgcctcctgggtagctgggatgacaggcgcccaccaccacgcgcggctattttttttttttttttttttttgtatttttagtagagatggggtttcaccatgttggccaggttggtctcgaactcctgacctcaggtgatccgcccgcctcggcttcccaaaatgctgggattacaggcgtgagccaccgcaccctgcccaaaatgtttatgttttttgtttttgagacagggtctcagtgccgtcgcccaggctggagtgcagtggcgcaatctcagctcactgcagcctggacctcccgggctccagagtagctgggaccacaggtgcgcgccaccacacccggctaagtttttgtacttttagtagagacggggtttcgccatgttgcccaggctggtaccttttatgtttttaaagagtgttaaatgtgtattttttaaaaaatttattctggcagttgtttgttaaacgccaactattttccaggcactatgttaggttctacagatgcgttttggagtagtagactgatttattagctagttcaacaagtcgcttaacccttgtgtgctgaaaaatgtgctgattataggctaactagggacagttgaggaaggcttagaaattttttttttgttttggaaacggagtttcgctcttattgcccgggttggagtgcaatggcgcgatctcagctcactgcaacctccgactcccaggttcaagcgattctcctgcctcagcctcccgagtagctgggattacatgcatgcgccatcacgcccggctaattttttgtaattttagtagagacagggtttctctatgttggtcaggctggtctcgaactccagacttcaggcgatccacctgcctgcctcggcctcccaaagtgctgggattacaggcttgtgtcatcgtgcctggccggaaggcttagaaattttgccagtcgcttttaaacacaggcatttttgaaaattaagacatataaacctacagttaaataacttatattgaaaacaacggaatacatattcaacacgtcactttctaattattttactacacttttttttatatgtgcttttgagattatttaccaccgctgtatcagtacagcaaatactatctctttctcttcccaaatggtggtgttcagtttcctcaggttgatagattgaaaatccctcccaatgcgagtgtttacaccacaggaatcagcaaacactacaaatcaggggtttggggtttggagagcccattgataagcattaagcagcacacttcattaattaatgtatagtaagtgcttaaatattagcaataataatattaaatgtgcaaggaaatttcatatttgtgaagaaaaggaaacaggctggacgcagtggctcacgcctgtaatcccagcactttggaaggccgaagcagccggatcacttgaggtcaggagtttgaaaccagcctgcccaacatggtgaaacctcgtctctattaaaattacaaaaattagccaggcatggtggcctgtgcctgcagtcccagctactcaggaggctgaggcaagagaatcacttgaacctgggaggcggaggctacagcgagccaagatagcgccattgcactccagcctgggcgacagagccagactctgtctcaaaaaaagaaagagagagaagaaagaaaacgaaacagtgtatgactgagaataactgctggtgtaataataagggtggtaacactagacaaggtgatcagggaagactctagaaagaggtgatatttgagctgagacctaaaggatgagaaattaatcagagcctccaagcagaaggaacggactgagtggggaaagagcaaggtatgtttgaggatcagaaagaaaacaagtatggctcaagtggagagaatagaagaagctgtggatggagagacggggggcaatcaggtagggacctattggccatgcttgagaatttgggctttattcaaagtgcaatccatatgccattggagaattttaaaccagaaatgatgtgaacaggtgtacatttttcaaacatctctatattcccacaagccctctattgggtgttggggaatattgcagtgacaaaatggcaccatctgcctttgcccttatgtaacttggaaagcagttgaagagataaaatagttaaagaataacataagtaaaatcacaaaccataactccagcctgggcgacagagcaagactccgtctcaaaaaaaaaaaaaaaaaatcacaaaccttaatgagagaaagaaaagggggagtgggccaggcgcagtggctcacgcctgtaatctcagcactttgagaggccatggcgggaggattgcttgagcccaggagtttgagaccagcctgggcaacatggtgaaacctgtctctacagaaaacataagaattacccaggcatggtggcgcatgcctgtagtctcagctactgggaaggctgaggtgggagaatcacttgagcctgggaggttgaagctgcagcgagccaagatcacgccgctgctctcaggcctgtacgacaaagcaagaccttgcctcaaaaaaaaaaaaaaagaaaaaagaaaaaaaatggccgggcgcagtggctcacacctgtaatctcagcactttgggaggccgaggcaggcagatcacttgaggtcaggagttcgagaccagcctggccaacatggtgaaaccccgtctctactaaaaatacaaaaaatttagctgggcaaggtggcgggcacctgtaatcccagctacttgggaggctgagacaggagagtcacttcgacccgaggatcggcggttgcagtgagccgagattgcaccactgcactccagcctgggcgacagagcaagactgtctcaaaaaaaaagaaaaaagaaaaagaaaaaaatgggagtgggattctaaaagaatgcaaaaataaaccctggggctgatagctttctggaccagtgaaaggggtagggtctcctttgggggaggggatcatgaagaaattagaggggcactcatcctttgagcccctgctgtgtgccaagtagtgtaccatatgcttaacacacatgagcttatttagtctgcacagccttccttcttaaagatgtgggtttttgtatccccttttacataaaaggagatatatgtgttgcatcatcttacagtgaagtgtattacatcataaaaagtggaagtaattgtaacactaacctcatagtgaatattgagcaaggttatacaatgtaaaatgcttagcacatacccagtgctcagtaaaggttacttagctgttatattatttacatcattctaacagatgacttaaaaatttatcttagggtgaggattgtctttgggaaaaacagtgattagccattgtagacagatgtgacccaaaccagtggttctcaaaatgagtgtgcatgaagtatgaatacaactagtggttctcaataaaaaaacacaagacccaaatacagaagctagaattataaaactcataaaagaaaacataggagtaaacttttatgacctttaattaggcaatggtttcttagataacaacaccaaaagcacaggcaacaaaaggagaaataagtaaattgagctttgtcaaaattaaaaacttctgtgttccaaaggacaccatcaagaaatgaaaactgctgggcacggtggctcatgtctgtaatcccagcactttgggaggccgaggtgggcagatcacttgaggtcaggagtttgagaccatcctggccaacacggtgaaaccccgcctctactaaaaatataaaagttagccaggaatggtggcgggcacctgcaatcccagctatcgggaggctgagacgggagaattgcttgaacccaggagctaatgttgcattgagccgagatggtgccactgcactccagtctgggcaccagagcaggactctgtctcaaaaaaaaaaaaaaaatttaaagactgggcgcggtggctcacgcctgtaatcccagcactttggaaggccgaggccggtggatcacaaggtcaggagttcaagaccagcctggccaagatggtgaaacccccatctctattaaaaatacaaaagttagccagtcgcagtggcaggcacccgtaatcccagctacttgggaggctgaggtgggagaatcgcttcaacctggggggtggaggttgcggtgagctgagatcatgccactgtactctagcctgggcaacagagtgagactccatctcaaagaaaaaaaaatttaaaaaagagaaatgaaaactggctcaggcctgtagtcccagcactttgggaggctgaggtgggaggattacttgagcccaggagttcaagtccagcctgagcaacatgataagacccccatctctacaaaaaattaaaaaaaaaaaagccaggcacagtggttcacacctgtaatcccaacactttgagagaccaaggtgggtggattgcttgagctcaggatttggagaccaacctgggcaacatggcgaaactccatctctatttaaaaaaaagaaaaaataaatacaaaaatgagccaggcatgatggcatgcacctgtagtcccagctactcgggaggctgaggtgggaggactgcttgagcctaggaggcggaggttgcagtgagccaagattgtgccactgtactccagcctgagcaacagagtgagaccccttcaaaaaagaaaaaagaaaacccacagaatgggagaaaattatctgcaaattatatatttgagtagggacttatccagaatgtttaaagaactgttacaactcagtaataaaaagacagtaataaaagacaaatacccaaatggagaaaggaattgaatagacatatcaccaaagaagatacacaaatggccaataagcatgtaaaaagatgctcgacattattagttattagggaaatgcatatcaaaaccacaatgcgataccatttcaaactcaataggatagctataataaaagactgacagtagaccaggcgcgatggctcatgcctgtaatcctagcacttttgggaggccaaggcgggcagttcatttgaggtcaggagttcaagaccagcctggccaacatgttgaaaccccgtctctacaaaaaatacaaaaattagctaggcatggtagcacacgcctgtaagcccagctactaaggaggctgaggcaggagaattgcttgaacccagggggcagaggtttcagtgagccgagatcacaccactgcactccagcctgggtgacagagcaagactccatctcaaaaaataaaataaaaataaaactgacagtaacaagtgttgacaaggaagtggagaaattagagcttttatacatggcaggtgggaacataaaatattgtatccactttggaaaacaggttggtatttcatcaagatgttaaacagaattgccttatgacccaccaactcaacacctagctatatatctgagagaaatgtaaacgtatgtccacaaaaaaaattatgcacaaatgttcatagctcattcataaaaccaagaagtggaaataacccaaatgaatggataagcaagatgtggtatacctacaatggaatataactggacaataaaaaaaaatgaagtagttatccatgctgcaacatagatgaaccttgaagacattatgctaaatgaaataagccagtcacaaaagaccacatgctatgtaattccatttatattaaatgtccatgggtgggcgtggtggcgcatgcctgtaatcccagcactttgagaaactgaggcgggaggattgcttgagccccaaagtttgataccagcctgagcaatataggggagactccgtctctataaaaaagtaaaacatggccaggtgcggtggctcacccctataatcccagcactttgggaggccaaggtgggtgcgtcacctgaggtcaggagttcgagaccagcctgaccaacatggcaaagcctcatctctactaaaaatacaaaaattagccgggtgtggtggcatgtgcctgtaatcccagctactcaggagactgaggcgggagaatcactttgaacccaggagacagaggttgcagtgagcgagactacgccactgcactccagcctgggcaacagagcaagaatccacctcaaaaaaaaaaaaaaaaaaaaaaaagtaaaacattagccaggaatggtggcaggcacctgtggtcctagctactcaggaggctgagacaggaggatcacttgagcctaggaggtagaggctgcagtgagccgtgtttgtggccactgccctctagcctgggtgacagtgagactcttcctcaaaaaatattaaaaaagagagaaatgtccagaagagtcaaatttatagaggcagaaagtagattagtgcttgcctagggctgggggtggtgactgggggagtagggaatgggaaatgactgccaataggtacggagtttcagctgggtgcggtggctcatgcctgtaatcccagcactttgggaggctgagggcgggggtggatcacctgaggtcaggagttcaagaccagcctgaccaacatggagaaacgctatctctactaaaaatacaaaattatctgggtgtggtggcgcatgcctgtaatcccagctacttgggaagctgaggcaggagaattgcttcaacccgggaggcagaagttgcggtgagctgagatcacgccatttgtactgcagcctggacaacaagagtgaaacctcatcttaaaaaaaaaaattagtaagcatcagaatcacgggggagatgtattttttattttatttatttttatttttcataaatagagatgggatcttgctatgttgcccaggctggtcttgaacgcctgggctcaagcgatcctcctgcctcagtctcccaaagtgctgggattactggcatgaccagcctagatttttgaagtgtaaattttctagttctgacctagagactaggcctggtgtggagcccaggaatctacattcttaatctctccaggtaattctaatgtttgtgattcagaagccataccttgggaaacaaaaaaataaccctgaaggcgtaggtgtccagtagcttacacaaaaaaagatgaatatagtaatgataactagcaaatattgagtgcttactaggtgctaagtactgttttaagtgctttacacatattatctcatttagtacatgtaccgttacaagtgctatctattatttctccatcaccaatgaggaaacagaggcacaaagaggtttagtaacttgcctaaggtcacatggctagtaagtggcagaaccaggatctgtctgttagctctagatactgtggtcaagctgctctgcctgagaaaatgagaagaatttgggttgtgttggattgggttgtgttgggttgggttgcgttgggttgggttgggttgtgttgggttggattggggtgctttcttgttgtagctgagaaggaagggtagggaatagaaaggaaggagataataaaggagcaatcatggtgttttgttttgtttttttcctgtgacaccagagattcctgtgatatgtgggttacctagagaggaagaaattgaggtgctaagatactaagtaaccactggaatgagtgaattgcaatcagtttttaatgaccttgcatctttccattcaagaatcagcattcttggaaaaagcgcaagattgattaagattaggtcttgtgcccaatcttaatcagccagaaaagtgtatctgtgagaagtcagatgatgaatttaccatattcgcctgaggacagcacaccctaaaggcaattggatgaagtcagttcgaggaaggcgaaagggtacagtcctgtgctgcataaagacattttggtcaacgttggactgcatataccacagtggtcccctacgattatagtggagctgaaaaattcctcttgcctactgatgttgtagccatcataacatcgtggcttaatttgttatcttttctatgtttccatatgtttagatacacaaatacttaccactgtgttacaattgcctgtagtatccagtatagtaacatgctgtacaggtttgtggcctgcaagcaataggctataccatatagcttaggtgcgtagtaggctttaccatctaggtttgtgaacctgctaataataatagtgatgacaaagacagacccaggcctccctgtactgtggtttatagtctagcagggagtcatacaaaatagaagtaagcaaacaaaataattagggactgtgaccacaccaaaataagtagggattgtgagggcaaaagaccaggaagaatgataatgaataatggaggacctactgtatattggatggtcaagaaaagcctttctgaagaggtgatatttcagctgacacccaaaggatgggaaggagccattgatgtaaagagttggcagtggtatgtattggaaggaggggatggaggttacaaacagcttgtaatgagggaggccaatgtagtcggagtgatacgagcaagatgtgagactggagaagcaggcaagggccagatggccttggtggactatggtgctaagttggatttttattctaagagaaatgggaagtgcacggaagggtttcaagttgagttggaacataatcatcatttaaagtttaaaaatatgcctctggccaggcacggtggctcacgcctgtaatcccagcactttgggaggcccaggtgggtagatcacgaggtcaggagttcaagaccagcctggccaacatggtgaaacaccatctctactaaaaatacaaaaattagccgggcatggtggcaggcgcctgcaatcccagctacttgggaggctgaggcaggagaatcgcttgaaactggaaggtggaggttgcagtgagccaaaatcacgccactgcactctagcctgggtaaacagtgtgaaactctgtctcaaaaaaaaaaaaaaaaagaaaagaaaagaaaagaaaatatgcctctaaggctgggcatggtgattcatgcctgtagtcacagcactttgggaggctgaggcaggaggattgcttcagcccaggagtttgagaccagcctggccaacatttcaaaaccacatctctaccaaaaaaaaaaaaacaaaacaaaaaaaaaaaactagccaggtgtggtggtgcacacctgtggtcccagctacttgggaggcttaagtgggaggatcacttgagcctggagggtcgaggctgcagtgagccatgatcgtgccacactgtactccagcctgggcgacagagtgagaccctgtctcaaaaaaaatttttaaaaagacacagcaaaggcctgatctgtgtgactgcggattttttaccagaagacaataaactacataaaaatttaaaaacaaacagtaacaaccacgtgggtgggtgtggaagtcagtagcatgtacgaaaaggtcattaaaggcttctttgaggtcgcaaaagtaaaaagggcctgatccagttcattgtacagattgggaaaaataaagcccagaggagcagtgccaggcccaggatcacacagcaagtcaatagtggcacttggcccagaaaccagggttctcactatcggccttttatactaacggcctcctggtcctgggctggagtctcccgtgaggcccactgggagacccatataccagctccctcctcaatctgagacccaagtattgtaagggcccaaaagaaggatttggatttacataacgccctgaggacagatttctgaaacccttccttcctgtcccctactcacaaatacccactattgtaaaagctatcctgtagcaacaagaccaaaatgtaaacttggcctaaaactggaaagctgtagataggctcttgcacctccaactttctttctctgaatccctctcactccccaggagccacactccctacaactgtgcatccaggcctctcatccccatcccccaaatatacacacatttctctgctctgagaaaggagataggtttgcttgttgcttcctggtatccattccccctttccctgacatccattagaaactcaaagatggctgggcacagtggctcatgcctgtaatcccagcactttgggaggccgaggtgggcggatcatgaggtcaagagatggagaccatcctgccaacatggtgaaaccctgtctctactaaaaatacaaaaattagctgggcgtggtggcatgcgcctgtagtcccagctactcgggaggctgaggcaggaaaatttcttgaatccgggaggtggaggttgcagtgggccgagattgtgccactgcactccagcctggcgacagagcgagactccgcctcaaacaaaaaaaaaaaggggaactcaaagatttgctgaatgaatgaatgaatgtgcaaatgaatgaatgaatgaatatctctaattcctttcttaaaactcttcattggctttccattgcacttaatttaagaaccataattctgaggccgggcacggtggctcacgcctgtaatcccagcactttgggaggctgaggcgggtggatcgcttgaggtcaggagttcaagatcaggctcagggcttagacatcccaatgataactgagactttgagctttgactcagagggaagcacaagggcgagttccagatgacaccctaaggctcatcttagggtggaagtctaaagtggtacagcactttgggagagtaacttgacagcatctgttaaatttgaaatgtacatacctatcaatcttgcagttgacttctctgaaaactattctgtatatccaaggatagtcactgtagcattcattgtggcagctaacatggtgaagccctgtctctactgaaaatacaaaaattagctgggcctggtggcatgcttgcaatcctagctactcgggaggctgaggcatgagaatcacttgaacccaggaggcacaggttgcagtgagctgagatcgtgccactgtactccagcctgggtgacagagcgagactctgtctcaaaagaaacaaaaagaaagcatatactccaagcattatctattacagttgccttagtcatttacttcacactcctacgggcctcagaatactttgcaacaatctttactatctccgacggagtgtacagctcaacattctttatagccacagggttttatagacttcacatcatcattggctcaactttcctgctgccttctacgccaactaccatttcactttattcaccgttttggatttgaagctgctgcttgatactgacattttgtagatgtagtatggctatgccggtacgtttctgcctattgaagaagatcatgttcttttagtattaaacagtacagttgacttccaatcaattagtttatatataggaatcttgtgtagcctgcagtggggttgtggggagcaaggcagaagcagccactccagagaggatttacatttatttcttccaggcatctgagagatcatttcagagtgggtcgctttttatattaatttctcagcttcgagattcccagccatgcaggtgatgcaaatgtgaacgccagactcatggagggtaggcatgtggtttcaaattctcaggagattattttccctcttacccaaagaccaggtcaagatggacacatcctttttgtctcccttcgctagtaggtgttggtttttcccctagtttgttctttcactgtgggtgtagcccttcaagggtcctagatttatcaagggtctcagttgcaacctctaatttcatataagcccaaagcttcaactccccaaatgtttctttaaaaacacaagctattgcagattcagttgtgccttttaaaggatgtttgttgtttttatttccagcatctccttgggttgtgtagcaggaagttcctgatattgtcagaaaaggaagtccaactcagtatttagtacaactgtctgtttacttgtctattttctccatgagtgtcaagctctgggaggtcaggaactaaggctgactcatctctgggacaaaacaccaggcccaagatctggcacaaagtaaatgctcagtgcgtttgttgatactgaacctccacttggtcacttctaatgatggggagctcactttctcccaaggtggcctctttcctttagagagggtgtgtgacctgagtgaccaccgggctaatgggggacagcctgcccctcatttatgtacaaccttcccaatacttagcttgtccatccagattctgcagaagggggctcaaggcctagacatcccagtaataactgagactttgagctttgactcagagggaagcacacgggccagttccagatgacaccctaaggctcatcttagggtggaagtctaaagtggtacagcattttgggagagtaatttgacagcatctgttaaatttgaaatgtacatacctatcaatcttgcagttcacttctctgaaactattctgtatatccaaggatagtcactgtagcattatttgtggcagcaaacaattgaaaaccacccaaatgtctgtcaataagaataactaaataaattctctaaagtcaagtcatacagtggaaaactgtgagccttttatttttgtttttttgagacagggtctcactctgttgcccagactagactgcagtggcgccatcacggcttactgcagcttcaaccttctgggctcaaaggatcttcccaccttagcctcccaagtagctgggactacaggtgcacactaccacacttggctaattactttttatttttgtagagatgaggtctcactatattgcccaggctggtctcaaactcctgggctcaagagatcctccaacctaggcctcccaaagtgttgggattacatgcgtgagccaccacacctggcctatgtttttttttggtttttttttttgagatggagtctcgctcttgtcacccaggctggagtgctgtggcgcgattccggctcattgcaatctctgcctcccgggttcaagtgattctcctgcctcagcctcctgagtagctgggattgcaggcgcctgccaccacgcccagctaatttttttacttttagtagagatggggtttcgctatgttggccagtcttgtctcaaactcctgacttcaggtgatccagctgcctcagcctcccaaagtgctgggattacaggtgtgagccactatgcccggcatgttttttttttttaataaggtagatctatgtatattgacataagtggaattccaagacatgttgctgtgagtctgtaagacagagtgtataatatcaagaaaacagacaaacctataagcagtgtaaattggtacatcatggaggctatttggtaatatcagtcaccttttttttttttttttttgagatggagtcttgctctgtcacccaggctggagtgcagtggcgtgatcttggctcactttaacctccactcccgggttcaagcaattctcctgcctcagcctcccgagtagctgggaatataggtgtgtgccaccacggccagctaatttttgtatttttaatagagaaggggtttcgccatgttggccaggctggtcatgaactcctgacctcaggtgatccatctgccttggcctcccaaagtgctgggattataggtgtgagtcaccgtgcccagcctaagtcaacttttaaaatgctatttaaacttttaaaataacctcaactgactaatccccactaatagatatttatattacaaataaatatgcaaaataatgggtaaaaatattaattgccacattgtaataacaaaatattggaaacaaactttttctccttatgagactggatatatagagtgcatctatttgatgggatactatgcaggtttgaaatagaatgaggctgctctccatatcgatatggaaaggtctgcaagatagagtatgaagtgatgaaaaaacaaggtgcagaatagtgtctctatgtttatgaaaaatacatgtattatatgttggattttattattttattattaattttttgagacagcatctcacatctcactctgtcacccaggctggagtgcagtggtgcaatcatggctcactgcagcctcaacctcctgggctcaagcaatcctcccacctgagcctcctgagtagctgggaccacagggctacaccaccacgcccagctaatttttgtatgttttgtaacaacagggtttcaccatgttgcccaggctggtcttgaactcctgggctcaagtgatgctctcgcttcagcctcccaaagtgctaggattacaggcatgagccaacatgctcactctgcattggatttgaaatgcatagaattcctctggaaggaatcacagggaactggaattggttacctccaggaaggagaccaataattgggaactgggaagggaaggacacctgcaaacgctgtactccctattgaagctttgtaattttgaactatttccttacaattaagtaaggaagtaaaaaatgttaaaccataattgtaaaactggaagcaaaacaagctgtacaaaacactttctatatgtacatacacatgttgtgtagaaaaagaaaagaaggatacacttcagactggtggcagtggcagaagttttctgggactggataacaaagggtggtcaagggtgaccttgactttatctttttgttgttgttggggttttttgtttgtttgtccgttttgagacggggtcttgctctgtctccaggctggagtgcagtggcagaatctcggctcactgcaacctccgcttcccaggttcaagcgattcccctacctcagcctcccaagtagctgggactacaggcgtgtgccactaagcccggctaaattttttcattttagtagagatagagtttcaccatgttggccaggatggtcttgatctcctgacctcctgatccacccgcctcagcctcccaaagtgctgggattacaggcgtgagccaccgcgcccggcctgttgttgttgttgttgttgttgttgttttttaacatacagggtcttgctttgctttttttgtttgtttgctttggggttttgtgtttgtttgttttggagttttttgtttatttgttttgagatgtcatccaggctgcagtacagtggtgcaatcatggctcactgcagcctgaaccttccaggctccagcaatcctcctacctcagcctctggaatagctgggactacaaatgcatgtcatcacatgtcgcttttatttttatttttattttttgtagagacaggggtctcatcatgttgctcaggctggtcttgaattcctgggctcaagcagtcttcctgcctcagcctcccatagagctgggatcacaggtatgaaccaccatgcctagccttgcttagatttttatataatctttctgttaattgttactttttttttttgagatggcgtctagctctgttgcccaggctggagtgcagtggcacgatctcggctcgttgcaacctctgcctcctgggttcaagtgattctcctgcctcagcctcccgagtagctgagatcacaggcacctgccactacacccagctaatatttgtatttttagtagagatggggttttgccatgttggccaggcagctggctggtttcaaactcctgacctcaagtgatttgcccacctcggcctcccaaactgctgggattacaggcgtgagccacagtgcccagcctgttacatcatttaaaatccattttaatctttaaaagtaggcttcaggtggatggaacacaaccacagcctggcaaaggaatgaggctgactctcctccttctgagggaagtattcatgttgtgctctttgtcccactgccttccccaaggacagcctggctcagtggaggcaccggggctactcctggcatcattccagagagcctctcttgtcacctcttacccacttggctccctgtcaccagtgttctgggctgggctgagaagcagcacagattaactattgggttgtatctccagaagccccatcgatgtcaggttgggcagagccagcccaggaaacatggaacatctgcctctggcctctcacctctttgttctcctacgaagcccggcttttttttctttttttgagacggagtctgctctgtcacccaggctggagtgcagtggcgcggtctcagctcactgcaagctccgcctcccaggttcaccccattctcctgcttcagcctcccgagtagctgggactacaggcgcccgccaccatgcccagctaattttttgtatttttagtagagatggggtttcactgtgttagccaggctggtctcgatctcctgacctcgtgatccacccgcctcagcctcccaaagtgctgggattacaggtgtgagccaccgtgcccggcttgccctttttttttttttttatagattttggcagttacttggaatattctttccctttgatactccactacctttttcctcataccccaatttatatttctgtctcatctcattcagtggagaggaggcatctgaaaaacccatcaactagatgtgcagggatttaatgttcctacattaattgtattttaggaggcatctaaaaaggacgatgcttaactatgaggaaacacacaataatgatggaattcctagcaccggtggagaagagatcctgaggcagaaaggccttgctatcactcttcagtcatgttgataggcaatgctacaaagggcttaagaacgtggcactgaggctgggcactgtggctcatgcctgtaatcctaacactttgggaggcccaggcaggaggattgcttgagcccaggagctcaagaccaacataggcaatatagggagaccccgtctctatacacaacaacagcaacaaaaattagacaggcatggtggtgcatgcatgtagtcccagctaatggggaggcagaggtggaaggattgcttgagcccaggaggttgaggcttcagtgagctgtgattgcaccaccgcactccagcctgggcaacagagtgagacctcatcttaaaaaaaaaaaaaaaaggccaggcccagtggctcacgcctgtaatcccagcactttgggaggccaatgtgggcagatcacaaggtcaggagattgagaccatcctggctaacatggtgaaaccccgtctctactaaaaatacaaaaaaattagctgggtgtggcggcgtgcacctgtagtcccagctgctgcagaggctgagacaggagaatggcatgaacccagggccaagaccgcaccactgcactccagcctgggtgacagagcaggactccgtctcaaaaaaaaaaaaaaaaaaaagaatgtgggcactggagccaggctgcaggctgacagattcgtatctgtcacttagcagctgttgaacctttgacaaataacctgtctgtgcctcagtttccaaatctgcaagatggagataagagtagctcctttataggactgttgtgaggctgtaatgagatattacatgaaaagcctgtagtcccagctactcaagaggctgaggctggagtaccacttgagcccaggagttcaagtccagcctgggcaacatagtgagaccctcatctctaattaaagaaaaaaaaagagatttaatctctctgtaatccccatcactttgggagtctgagacaattggatctctggagcctgggagtttgagaccagcctgggcaacatggtgaaaccccatctctactaaaaatacaaaaattagccgggcatggtggcttatgcccatagtcccatatactcagcaggctgaggaacaaagaattgctcgggcccaggaggcagaggttgcagtgagccgagattgcacttgggtaacacagcaagactctttctcaaaaaaaaaaaaaaaaaaaaaaaaaaaaatcggccgggcgcggtggctcacacctgtaatcccagcactttgggaggccgaggcaggcggatcacgaggtcaggagattgagaccatcctggctaacatggtgaaaccccgtttctactaaaaatgccaaaaaaaattagcaggtcgtggtggcggccggcgcctgcagtcccagctactccggaggctgaggcagaatggcgtgaacccgagaggcggagcttgcagtgagccgagatcgcgccactgcactccagcctgggcgacagagcgagactccgtctcaaaaaaaaaaaaaaaaaaaatcaaagggcctccgatctatgccaaccactccttaagatccctttggttctcaccaatctctcatatcccaccactgcctttcagtggccttcactcaccaaacctgttactcttcatcaaaaactgtacccctaggccctttccctcaggcctcgctttttttctttttttcctctcacctctccatcctgtccctgttaccctgttatctcagttccatatctcaaaagcctagaaaggcagacaagacagagctctccttaaaaagtgatgggcaggccagctgtggtggcttacgcctataatcctagcactttgggagatcaaggcaggaagatcacttgagaccaggaattgggcaacatagtgagacgcggtctgtacacaaaattttaaaaattagctgggcatggaggtgtgtgctgtagtcccagctactcaggaggctgaggcaggaagattgcttgagcccaggagttcgaggctgcagtgagccacgattacaccactgcactctagcctgggtgtcagagaccccatctctaaaaaataaaaaaagtgaaggccaggtgcagtggctcacacccgtaatcccagcacttcaggaggccaaagtgggaggactgcttgagcccaggaattcaagaccagcctgagcaacaaagagagagagagagagagagagagagagagagagagagagagagagagaaaggaagggagggagggggagagagagagagagagaaagaaaaataaattagccaggcatggtggcacaggcttggataattttttaaaaactatttgtatagaaggggtcccactatgttgtccaggctggtcttgaattcctggcctcaaacaatcctcctaccttgacttcccaaagttctgggattacaggcgtgaagcctgcgtgtatcgattttctattgctgtgtaacaaacaaaacctccacagacctaggggctcatgacagcacctgtttattagctcacaattctctaagtcagaagtctaggcacatctgggttctctgcttgggatcccacaagtctgaaatcaaggtgttggccaggtgtgtcctcatatggaggcttgactagagaaagatcaacttccaagctccctctggatgttggaagaattcattttcttgtgaccatattagcaaggccctgttttctcactttctgttggcaggggaccactctcaactctcagcttgtagaggtccctcttgggtcctcctcttgtggccctctccacacatagcatttggtccttcatgggagcaccagctgctggaaaaaatgattctgttaggtaaaaatactatacatttttgaaacatgcaccaattatttagctctgtgattgtgggcaatttcttcaagcagcctgagcctcaatttccttatttgtaaagctgggaaaacaacgatgcccatcttggagggttacaggcacatagaaaaacaatcaataaatataagctgctgtttacatttgttctttttttaaaaatttttaaattttatttatttatttattttgagacagagtcttgctctgtcatccaggctggagtgcagtggcgtgatctcggctcactacaacctctgcctcccaggttcaagtgattgtcctgcctcagcctcccaagtagctgggattacaggtgcacaccaccacgcccagctaatttttgtgtttttagtagagacgggttttcaccatgttggccaggctagtctcgaactcctgaccccagggcatccactgcctcccaaagtgctgggattccaggtttgagccaccacaccaagcctacattagttctaacgaatagacagggtctagacacagtgagattagatgagtgagggacagggttccctacatggagaaaactgcaagagccaaatcttggaagcaggaaagctggtggtttatttgtgaagggtgtgtgtgtgcgtgtgtacagagaacgctgaaagagtaggtgaacacagttttgcttatccctccagtcagaatttactggatgcttactgtgtacccagtaccatgaaagggtgcccggccagcagtgtgaattcagcctggaagtgggagggagccaaggaagagctctgagttggagagggaagtggtctaagcttcgggaaatttatctgctcctagtagagtggttgactcagcaggagagaacccccttctcttctgcaccctctcctccctagcctcaaagcctgctaaggacccagttcccaagcagagacccaggagggagttgcagaatctggccctgtctggacaagacagacagggtgcgactccagatgccagttcctttctttctgctcctgaatggccccaaagctatcccttctcaccacaatggtcaaggagggatacagcaatttctcttttaaatgttacacatagggctgggcacggtggcctctaatcccagcacttcaggaggccgaggtaggaggattgcttgagcccaggagttggagaccagcctgggcaacataggaagacccctgtctctaaaaaaaaaattagaaaaataaagttctaaatgtgggaaatcatgctgggcactcaactacagcagctcacttgggtacttgtccacactcacaaatatagccctgggaccccaaagtcactgtcccaccctcacaccatgggcagatggactcaaactaagccaggcttttggctttctgccacttgcctcttctctctgaagtgaatcctgtcctgatcatcacctccttgctgacagggccattaagcgcagttcacacaaacaaaccacgatgccttgaggttgagactgggaggtatgttaagggagcatggagccagccattctgcagatggggaaactgaggcaaagaaaaaggaagtgacttgcccaggctcaggcagtgagcccaggacagaccaagactgaaatctgacaatcagcccagggtttatacacacacacacacacacacacacacacacacaccccacaatttgagttacgctcaaattcagacatcgtgggttgaacaacaaagctttttttttttttttttttttttttttttgccagagtcttgctctgttgcccaggctggagtgcagtggtgcgatctcagcttactgcaacctccacctcttgggttcaagtgattcgcctgcctcagcctcccgagtagctgggattaaaagcacctgccatcactcctggctaatttttgtatttttagtttcaccatgttggccaagctggtcttgaactcctgagctcaagttgtgtgccggccttagcctcccaaagtgctggcattacaggtgtaagccaccacacctgggccacaacaaagctttttgaatagaagttcttggaatatggcctcttgttaatgtgtaggcccatctgttgggggaatttggggattatgcctgctctagctggctttaccaattaaatgttttcccctctctgtctcagttttttcaccggtaagataggaagaatttattatctatgtcagagggattcctctcagcctcactctctatctcaggtcggggggcaggggagggtggggaaggaaaggagtggtgggccagtcctccagctaagcacacagactggcccatacctgcaagtacacacaaggtcccttgagcgacacacccaggctgacacatcactttaagggggcacggaggggggcaggcagtgggagtggcaagccagtggggagcccccaggtgagggcaagcccgaggaatagaagggtggcctctttttttttatttttgtttttgagatggagtcttgctctgttgcacaggctggagttcagtggcgtgatctctgctcactggcaacctctgccgcccggattcaagcaattctcctgcctcagcctcccaagtagctgggaccacaagtgcatgccaccacgcctggctagttttttggtattttttagtagagacagggtttcactatgttggccaggctggtctcgaactcctgacctcaggtgatctgcctggctcggcctcccaaagtgctgggattataggcgtgagccactgcgcccggcctgaagggtggcctcttgacctccagtcctgcagcccatgaaattgggcaggtactcacacctgggcatgggttagatgggcgtgggtccctagtaactctgagtatgagctcatgtgcatgtgtgtatatgtttatatatggatgccttcattgtatgcacagatacccatgattatccatgtgtgtgcataggaatggcaccctctgtctgattggaaatgagactccagagttaccccagcatgatgttcactgccttttttttttttttttttttttttttttgagacagtgtctccctatgttgcctaggctgaagtgcaaccacccaggctcaattgatcctcccacctcagcctcctgagtagctgggtcttcaggtgcaggccaccacacctagctaatttttgtatttttaatagagacaggattttgccatgttggccaggctggtatcgaactcctgggcttaagcaatcctcctgccttggcctcccaaagtgctatgattactggcctgcactgccgcgcccagctctgctgcctctttttacagcctgccggcccagaccagagtctcagaatactaagcccactttctggggccagggtcagtagatagctttgctgctgtatgattctaagcaagtatcttgacctgcatgtgtctcagtgcacctcagtttcctcacctataaaatgaggggtttggatgagttgaggtctgaagcctcctccagcccaggtaataaatctttgtagtggacaggaggaataggtcctaggggtttcaggaggggacttccatgggtacctctgactctacagagaaatggaagactgagatctgacttagcagcctagaaagacttagcagcctagaaatggggttcagctaattctgggaacagagtccggtcacttaaggtaccagagtgtagccaagagcccccttttctgggcttggggaaccagaaccatgtgttcaacagaccattgcctgtacacagggtagagagtgcaggtgtatactcctgaaccagccacccttcttttttttttttttttttttttgagatggagtctcactctgtcgcccaggctggagtgcagtggcacgatctctgctcactgcaagctccgcctccccggttcacgccattctcctgcctcagcctcccgagtagctgggactacaggcgcccgccaccacgcctggctaattttttgtatttttagtagaggcggggtttcaccgtgttagccagaatggtttcaatctcctgacctcgtgatccgcccgcctcagcctcccaaagtgctgggattacaggcgtgagccaccgtgcccagcccccagccacccttcttaagcttcaagctataactactgagcctgtgatgaaagtctactctatgccagacccccacaagctgggtgcgggcagtatagggacaaagactctgcccttgggatgccaaccatccacttgagaagacacatacacatacaatgagtcatcatcacttactgtttatggacaaataaacgtccatcaaggtagccatcaactcgtgggtagggacaaggaaggctacctagaggaagaaagggtgagtagaatctctccctctctctctcttttttaagagacagggtctggctctgtcatccaagctggaatgcagtggcttgatcatagctcattgtaacctaaacccaagtgatcttcttatttcagcctccctaagcagctgggactacaggtgcatggcatctggctaattttctcattttttgcagataagtggtctcgctatattggccaggctggtctcaaactcctggccccaagcaatcctcctgccttggcctcccaaagtgctgggattatggctgtgagccaccacacctggccaagtagaatcttgaagacaggaaagatctggatttcagaaagttctgaagaaggcattccaggcaggggaaacagcttgagcaaaagggtggaggtgggagagtgctgtagagtcaacaaggagtttgactttagcacaagatgcgtgtaggagaaggggaggtgaagctggagagaactggggccggagcatggggggcatgagttctgtgttaggagtgtggggctttaggagccacatcaggttttagaacaaacaagtggcttgacaggagagacgtgttagggattatttaattaaagtcagcaagtaggtctgaaagggtatgaggttagcaggaagtggctgtgatgggcagaggctcagagttgcatggaatgaggacactttgggtataacactccaagggccacaatgccactcccctctccacccctcagccttgggttatttttttctggcttcttcccctgtcgctagggttaaggagtcccttgggggtttcagatgaggctgggatagagttttatcactagagtgccgggcacggtggctcacgcctgtaatcccagcactttgggaggccgaggcaggcagatcacaaggtcaggagaccgagaccatcctggctaacactaaacatacaaaaatacaaaaaatacaaaaaattagccgggcgtggtagcgggcgcctgtagtcccagctactcgggaggctgaggcaggagaatggcgtgaacccggaaggcggagcttgcagtgagccgagatcgtgccactgcactgcagcctgggcaacaagagcgagactccgtctcaaaaaaaaaaaaaaagttttatcactagatcattaacctctggcctaggtcacctccggcctccttttgggctaggtgggcagttctcggaccctcccccaccagccctgctctgctgacctagaacctctggccctggagattctgatatgtgtatttgtggtctcttctcgggcatctcccaggccactgggagagctggggcctagagcgtggggtgggtggaatcctgagggcagagagtgtggaagaatcttacaatggcagctctagagggaagcctggatatgtttgtttgacaaactgagacccagagaggtaacatgacttgaggtcacacagcaagtctagggcacagtcaggactgaaagccaggactctggggaggctaaagcgccctgaggtttagaccatctggttcatgtagagaatggagagggtcagggctgggagctatgggttcaaatcctggctctgccattgactgtacttttgtgacctaagaaagtcacttgagctctctgagtctgtttcctcaactgttaaacgggacaatatctaccttttgggttgttgtgaagataaaaaaacacacccatagcacaggtcgtggcacacagtaagtgtgccaatacatgtcagctagtggtatggtggtgcaatagtaggtgcctaataaatgttgaatgcattgttgaacatgagttcacacgctaacagtgagattgtgagactcagctttcccacgtgtaaatcaggactcataatcagtccctgtcctgccacttctttacagccccggtagcaacatagattaaataaggtatgtaaacgttcaagcgcggagccgtctcaggtcaatgtttactcagcccagggcaattcctctccaagtcctactctgcgaaatttcacgtcagcttcactaacttctctacattcccagatgctccccgggaaccgggggttggggatgtccctcttttctcaagcccgccgagctgaggaaaaacggggtgggaaagcagagtgtgtaaggctgaggaggtgagccagaggggggagggagagcaggaataagggcagtggggagaatgcaggtgcacggacgtggtgtgggtcgagaacagggtccgcatcgggggacttggatataggatgcagtgaaaggatttggggagcagtgggagaggtgagggcgctgcgatccgggaagaatcaggaaaataaggagccggtaggagggagtggagatcctcctcgcggagagctcgccgcggcgcagggctcccagctccccgcagctgcctccccgaacactcaccctcccggttccgagaacgtttcccggcccgagcgcccggcccgcaaaccgggaggggaggggaggggaggggcagggggggatccgcagcccgggattggccgccgccccgccagccggtgacgcgaggcgggcgggcccctttgtgacgtcacaatcagctgtttgaacgttccaatttgtgccgtgagccccgccgcagcggccgcacagactcaaagccccgcgggcgagctcagcagcccggagcgaccgcggccccgccgcctcccccgcgagtcccggcgatgcggcccggcctgtgagcggccggcgaccctgggacgccccgccgcacaactacctcaacgccgtgccgcccccctcccgcccccaggtgagtcccgacccgggtgggcctgggggctcccctgccacggacacgccctgcgccccccgcgcccgggcctttgtctgtctccgccggcggccgccggggccgcgttcccggctcccgattggttgccgcacgcccggtagaccatgacgtcgttctatttgcatatgacattgagacgtcaccaaggccggtaccgcccccacaggctcgggtcgcttgtcctcccgtgacccggtagccgctgtgtcggggctgggccctgggtgagacgctgcaatccaaagggggctgcagggggatcggcgatttcctaggcttatccaggggctggggtcaggcctctgatcccctactttctctttgcaacctgagaaggagtcagacggcgctgctgggcctaggttgagggggtcgtcaggagttcagggctgcatgggactccaggtggttgggacagcaccagatggtggtgggatcccctccctccggctccagactccgcccccagggactaacagaataacatcctcctaatccctgatttgtgtgcagcgccttagctgatgtcactcctagacccaaaatgaagggtcttagaccccagtgcatggaaggggcaacaggcccagagaggaggattagctctctcgaggtcacataaccaattagagtcatgctcactgagtgacagatggattattagccaggggcaaagacataataggggctcagtacaagtggtaagatacacatcctccttccactggggacccgatcttgggctcagccttatcacggtttgataggctcctaggtgtccttactcctggacccttttccagggaatctctggagattggttcaccttttgtggtcctgaccccttctgtcctcactgtaccttgaagtcctagagtccaataaaatcgctgcctcccagctgtttggatcacagagaggtgagtcattggctgcctcggggtgtctccagggctgatgttggggtggagggtggggtgagggttccctctattggccctttaccttcccaacttcctaggtcgtcagctaggaagggcctgacctggcctagtgcagacaattgcaggtgttttgctgctccctcgtcacctctgcccacagagagtataggagaagggataggataaggagagtttctgacttaacaagtggatgggcctagaggctgaaccaggaactccattcctgctgggagtttgctcaaggatgggctgggggtaggggtggcttagggcacaaatgctattctgggcagagctgctgtagttattaaagggaatggttctccctggagcagaactgggaatgtgagaaccaggaagctggcagggctgggaaaggaaatctgggaggctccccaagtggtcaggagagggggcaggcactggctggctggtgactgctttcactcctggctgtcactgacttgctgtgtgacctcaggcagggagcttttcccctgagcctccctcccctaaacctatctgaaatttggggaggcacagtgcaggctctggtacacagtgggtcttcagtaaatgcatgctaaatcttggtgccagtaaccccagacccttttgtagctaggcgaggggtggtgtggctaggtcaaggtctttttcacctccctgtacccctgcatcattgtattcttggggattgtttgctgagtctttcctgactgtgtacactctggactggatgcacagtaacgtgggactaggtctgccctgccactatctagccatgtatttttggatagatttatgtcttctttctgatcatcagattttaaaatgggctgggtgaatatgatggtccctgaaacagctcttaacttctctttcatattccatgaattagtaggttcttggaaggaggatgtgcctcatcaaggcctcgatattcccttccttcaagaggggccaaactttctgggcttttggtaatggagtcactagctccctgtggctacatatgggttgggatacatgaattgtgctgggtggacactagttgggggtggccccaccttcttaatccctgtagatctcccacccccatcccaccagagaagccagcatcttaagcctactgtgagtctgcagatgtggaaatattctcagggtatggaagtgaggtgattctgcagcaagtgtgaaaacatttctagggaatgggggaggtagcaataagcatggcaatactgcaggtggattagcagaaagaggagaaatgccttcagggaagtctggacatgcccccaggaagttctacaggaagtgtggaaacacccttagagaatggtgacaagtgtctcagcagcaaaaccgttgagcatctttagggaacaggtgtggagagtcagtcaggcttcaggtactgggggagtatggccagcagcccccagccaagctctagtcctgaggtaggctggcatggggagggggtagatctagagctaccaccttggtgtttccatttctgcagtagggggcctccctcttcatcttcacccagggaaggattggttaagggcttacctcggtctgggtccaaccctcagtgctcatccttaagggctcctgggaactgacagctccctcccttcatcatcacctcccactgacctgctgtctcactgagcccaagcaacctgatcttcctcctacccctggatgctgcccttgaacaggagcctgggaaaagggggtcagaggggggagggcctgccggcatgccatctttacacttcatatgacagacacaaccgaggtgtgccaaatcacatggtaagatggtagcagttctatgggatttctgctggccagtgcttttcaaaccacacaggctccaggagtggttcttaatctctggggtcaaagattgctgtttaggaaatcatgatgaaaaccaaggtcctttttcccagaaaaatacacatggaccatgacccctggccaccaaattgaaaatatcaaattcagacagacacccagaaaaggcaatagaatatagtgattctgggtgctgcctctggaatctgattgtgtggattcaatcccacctttgtctcctactagctctgagactttgggacagttaacttctctgagcctcaatttcttaactgtaaagtaaggacagtaattatccacttcctgtagttgttgtgaggattacatgaggtaatataggtaaagctgcttagcatagtgcctggaacataaatgttagctatatcattattattattttgagaccaagtttcgctctgtcacccaggctggagtgcagtggcacctcgcaggttccagtgattctcctgcctcagcctgggattacaggcacctgccaccacgcccagctaatttttgtattattagtagagatggggttcaccacgttggccaggctggtcttgaactcctggcctcaagtgattcacccacttctgcctcccaaagtgctgggattacaggcgtgagccactgtgcccggcctagctatattataatgataacaagcagacaatatgggcaatttcctccctgcctggagaactcctatttactcctcagagtgcagcttggatgtccaattctctggagaccttccctggcagagctgtgtcatgtgtcactctatgttcctaaagcaccctgtaataataactaatttattagtttgttgagtgcttaccatatgcccagacagttctaagcactttataagtgtttagctcatttaattcttcctcctccatctttttttctcattcaataactttggtatagctcatttaattcttattagagcctggaggaggatactattattagcttatttaattcttataagagcccggaggaaggtactattatcattgtcttttgacagatgagaaaactaaggcacagataagttaaataactttctaaaatcatacagaagataaaaaaaaaaccctggatttgaatgcagaaagcacatcttcccaaagcgtccgcacacatccccgttgtgtgtacccttctccctgctctgggggtgatatcttctggcctcttccccaggccaggagtggggtgaacctcaatcagtggtggctctcacgtccttctgattcccaggtttttgcactgccatagggcgcccccgtgaggcgcttcgccccccaccatgttccagcgcctctccagcctcttcttcagcaccccctcgccccccgaagaccccgactgcccccgcgccttcgtgtcggaggaggatgaagtggacggctggctcatcattgacctgccgggtgaggcctgggtctgtctcctgggcctgtgaagtcattctaagggcagatggcctagcagcggaggggaagggcgctgctgggggacgggggagtcccccaagcctactggaggtggggtcacggggccccttcccatgaaagccggggctctctcctggcggcccaggagaggcccgcacgtcaggtcccctagggcagcagggcgagacgcctggcccgtgggtgccccggggcgctgcggacgggctgcgggtctgactaacgatgccctttctctccccgcccccttgtccggtgtgtgtgtgtgtgtgtgtgtgtgcctcctcgctgctcccctcctctgcacggctcccatcccgcgccccgtagacagctacgcggctccacccagccccggggccgcccctgcccccgcgggccgccctccgcccgcgccctccttgatggacgagagctggtttgttacccctcccgcctgttttacggcagaggggcctggactcggtcccgcccgcctccagagcagtcccctggaggacctcctcatcgagcaccccagcatgtccgtttacgtcaccggcagcaccatagtgctagagcccgggtccccttccccgctcccggacgcggccctgcctgacggcgacctcagcgaagggtgagcgggccgggggcggagcctggaggcccagggagacggatcttggaggccagggtccaggctaggaggctggggtagtggggccaggagcccgccccgcgctcgagggggtagcggccttgggagggttgcctttgagacaaagtggggggccggtgggcctccgggcgaggctagaagcgggcctgaggacggaggggcggggcttgagagggaggggcgtggccaagaggctggggccggggttggaggcttgaggagcgtggctggagcgcctagggagtgggacttaaacagaaaggcaagggtggaatagggggtgggggtccagtctcccccgaggtccagtttacctgttaagggctagaaccgaggaggcacctccgggttggtacccacaagaagggcgtcgggcaccccaatctgaacagacacagaactgagccgaagcaagggtgggagatggcagcgccctctagaccccccgcccagcttacccggcttgaccgagcctggctctgtcctcacagggaattgacgcccgcccgccgcgagccgcgggccgcgcgccacgccgctcctctcccagcgcgggcggcgctgctggagaaggcgggccaggtgcggcggctgcagcgggcccggcagcgggcagagcgccacgcgctgagcgccaaggcggtgcagcggcagaaccgagcccgcgagagccgtccgcgccggtccaagaaccagagcagcttcatctaccagccgtgccagcgccagttcaactactgagcgtccaccggccgcgccacgaaccccttgccgatcccgatccctgtcgggctcctccgactcctcgggctggacaccgaaacctcccttcttaaagcgtgtgaggttgggtgatagccgttccttccccgacaccctcaatttccccatctctgatcctctaatctgcctctgaacccattcacccttcaccctcactcctggtccccatacccagcatctaatcatccatgccccctactcctggcccctccatcctttcttctctggtccccatccctgtctctccctttcacccttgccctccagtcctctacctctggcctgcccctatttctgaaagcttcttccagtccctgatctggctcattccccaccttcaactcccaccttacatgtctcacactatcccatggttggcattacactcactcctgttcccttattcttcattcccagtaattccctaccaaatggtggggaccctgagcccagctctgaccaggtagagcctgtgcagcctgggctgctgtcattgccctccagtaagggctcagggttttgcttttagtctccccttccttctgccttgggggcggtactctgtggagctgcttaggcctggaaaggtacagtatgtagaagaggactgtgagacgtgagttagagggagaagatggagggaatctagggaacgaggcagcctattggagatgcggacaggacagacacgttgagaagctgcagggagcagggcaccaagggagtgtgcactgtgcttgctcagagaggccaaaccctgctcccaggctgaagcctggagtctgcccccacttcccttttctataatccacccttctgcaggccctgaaatctgaagggcttagttagtaccttgccactctacccccaacacgtcacccgagtagaagctgggcaaggccctaccatcctggccgtctgttcacaagcccaaggtgctagaactagcttaggagacatgcaggccacagggcttctaggcagggaaagggcacacaccctaggtcagcgtgcagagcagtgatgctggaggacacaccatggggtgaagccatcccaaggctgacagctcagtcttcaccttgcctctggccttgtatttcacaccctgctcagtatggctagccagcagtcctgagtaggagtccaggactcccactgtctcaatctgcaaattgttcctatccaggttcagggccttcagggggcctcttttcattttctcccacaggcctctctttctttctaggttgctggggagaaatgggtaccctatgatccccctccccttctcctccagtaaatacctggaagagggaacctgaatccctgggggagacagaaggggcaggggccaccagcctccccttcttgtggtgagactgaattttgggctcagacaccagcaacagcctcttgggatgccctgagttgcttcccatttcctctttctagccgtccttttctagtgtgtgctcactcttcctaggaacttttaagacttcttggtacctatgaacataggtcctcccctcaccccaactctaggtttccaggcctcacagccaagctgaagcttggagaaaactctgcattcccatgagggcaaaggcagctgccctccctgaccctatagccccaggcctcatggggggtatgtggggaagggatggggtatccccatggatgctgggatgaggacagaggaagacctgatggggtctcctattccagggaataagccaaattaacactaaaaacggatcaaagctcccacgccagtccactagggccccagtagttgacagccttgctcctctcccaagttctccttcagaacctagttgcttttattcttccagctaccacttgggcacttcacagccagcctagggtcttcggcacctccaagagctgaatctccctccaacccttcttgcctactcctcactgccagctgggacctaggctcagtcctgtgtggtgcccatgatccttctggtgggggaagagtttaagttatagggcatttggctcaaattttaaaaggccttttgtttacctatatttctggaggctcctgtattctagaacccaatctctcacctgcttggttgcaaggctcatatttttttgtacctttcctatagattctgtagcatttgagtgtggcaatattttaattgtgtatagatttctaagaaccaacactactcagtctcctgctagtctgactcctgaagcatcagcccttgtcatactgtattgactgtgtacgtgcctttcaccttgagcatgcttcaggatttttttttaaaccacagaacttgaatacatgagggaaccagagttcaaagtcctatgcaaccttaggagggggttagagagtctgttttgattgatgttttctgaggccctagaggagtttgtatcaatttgtgagtattaatgtcagtactaccagcactttgccaaaactgtcagagggacccgtttctagagtgagtcccagttacatcaaacagtgacttccagttattccccagtaagtctgagtggttccttcaagctgggtgtctttccagcctttgccagtctagccccagcagggcaccgtgtatgaatgcagtttggtgctgttttagagtatgcctgctccccagccccctgcctggaaccctctgagcaacttgctctgacctataatgtcttaggtgcaacacggaccccaccagagctcttggatacccccctagatccatgtggctttatgtgaggggactgaatgcagacacaccatagcccccttctactactttccctctcgccctgccacctagttccacatggaaccaacaagttgagtgcatccctgttgggtgttttgtgttgagactggctgaaatgaggagactttgaccatgtgacgtgtcaacagactcaaggagacaaccacctcaactgggtcatgtggcatgcctgtgtatgtgtgtaacagaattctgattgttagactgtaatgctattcctctatgggagaaaaaaattaatataaagaaaaacaaataaaaatatatttaaagcacatgatcctttctgcctgagttgagcttaagtatgagaagcatcttgtaatcttaagcacagtagtggcataggatattatgataaagctggccttggttctggtgtgtgtgtcatatgggagaggaagaggggagataagcttactgggaacagagccagacaatggggtctgactcataaatgactactgttagaggatccttacaatgcaagacacatacatgaagacagctgaaatagagatgagaataacagcatgacagaatgaccaaactcatccttgtggtctcaggcactgggttagagcaagggcaagtagccactggaggggaaaggatgaagtctaatcctgggggagatgcagcagaaggctgaagcccaggctgagacaaggccagggccccaagcatcagagtctcctcaagttgcaggtagggtggggcagaagcagctggctttggagactacacacattttgaagaaggacagccagagtgaaatgtagtggacatctctgaaatatacagcacaaaatgacccctttaatttgggagctgctctgtctaaccacagaactaaaggtggaaacctgacctaaactggactagatttttttttttttgagacggagtttcactcattgcccaggctggagtgcaatagcgcaatctcggctcaccgcaacctccgcctactgggttctagcgattctcctgcctcagcctccccagtagctgggattacacgtgccaccatgcccagctaattttgtatttttagtagagacagggtttctccatgttggtcaggctggtctcggactcccaacctcaggtgatccacccgcctaggccctccaaagtgctgggattacaggtgtaagccaccatgcccggccctggactagattcttgatgctggcacaatcttacaggccagtttgggcttacctcctgcaaggaggagatgtcagcacaattgttttggagcaatccaccatgcaaatggaggagcagatatgtgacatggtgaaaaagtgccatctcagctgctgacagcttcctgtccctagaaaatcctgggtggccattgatctctaagttggttttgttatttgcatcaaaagaaatctgagcaatatatatcaaaatacctggcacagtgctgaacagggctagtttcttcaaagccaagaatgaggtgagggagcaagtatgtacattttcctcaacttgccaggcgggcatctcaggttcaatgaggactagataggaattccatccacaaggctgtgtctgcttagttaaggtccaaagaaagagctgatcacccaaaaatcccttaccaataacataactttatgttctatgacaatgacatttatttaacacgttatttcacattgtacaaatccttagattctctttattcactggtccatttctacaacaaatacatccaaaacactatataataaaattatttacaacatttccaaatgagaagattgcttttgcccccactactgctattcacacacagtacttccacggcacaatacatcattaggagatctaaaaatgctcaccctgtactctaggctgcttaggaaatgtgaaaactagtaacatttataatggcattagctcctttcaatacaagacaacattttagaaaccttgaacttcaactcgcaacaccaaaagggctcaacagtcctgctttccccattgcactttatgaaacaggttgcagggactaggaaaagggccacattattaaaattactaactgtacagaaattgatttaaaaaagtcacagctcaaaattgctctttgtaaaagtcacacacatttccaagtatcaagtcgcagtcctgcttgtttacttggattttcttcgcttggattgcaccgcactggttatgtctgtgggggaaagaaaggacatgttcagtggaagtaactctttacagcagtgccctttagacagtccacaacaagcagggcagacctaaggggagccctactcaactcagaatctgtctaaggggtgctctgaatggagagagtcacaggctttgcttgatgacttacgtgggaagagggtgtggtcctgcattgggcagaattggaatgtgacagaggtggtggcgatgaagcacactgactagagaaagtgcagggtggagagagcctttgtagctgggcaattcacccactgtttccctcaccagttctcatcataaaacgaagtgtaatagacagactgacaatgcttttggtgagaaatcaacgagtaatgccataagcaaatgagtaaattctgttagaatgcaaaaaaaaacctgccttgggatcccttttggagccaagctattgtttcacagtaaggaaccatttttgtcatgctatagtcaaggtctaaacaacatgaccatgggccttggtcagtgagggtctactatggcccagccagttatatcaagattgtggaaggctgggcgtggtggctcacgcctgtaatcccagcattttgggaggccgaggtgggcggattgcctgaggtgaggagtttgagactagtttggccaacatggcgaaaccccatctctactaaaaatacacgaaaaactagccgggcgtggtggcgtgtgccttaatcccagctactcaggaggctgaggcaggggaattgcttgaactacggaggtgaaggttccagtaagccgatatcccaccactgtactgtagcctggagacagcgagactccgtctcaaaaaaaaaaaaaaaaaaaaagactgtggatacatacagtcatgaatgcaattcagaataagcaacggcctgctctgagcccaagtgagcctgaaggcttcatggaggaggtgggaactgagtgatttacacacagaatgacagtgacatacagggaaatgactatgttttgattcctttagtttctcttgtactatcagtgttttaacttaatcttatgccagacttaaactgtgtttcttaaaaacgttttggccaggtgtgatggctcacccctgtaatcccaacactttggaagactgacgcaggaagctcacttgagcccagaagttttgaggccagcctgggcaagatggtgagaacccatctctacaaaaagaaaagaattagctgggtgtggtggcacatgcctgtagtcccagctactcaggagaccaagtgggaggatcacttgagcccaggagttcatggctgaaggagttcaaggctgaagtgagctatgttcatgccactgtactccagcctgggtgacagagaccccatctctatttaaaaaaaaaaaaaaaattctacacaaagttatggcagagtacagtgaatagcctgaagctctccaaaggtaaacacttctttagaatctcatattgacttcaaaaggtcacctttatttcatattctggttttaatatgaaaataatgttctaaaattacttctcatcaaggagaaaaaaaatgcttctaatatatcaatacaaaagatgaatcagatttacccatttctggtaactaggctgaattttctgatactgcatgttaggttgtattcaaggcaaattttcctttgtcttttgtatcataatattttgtgaacccagactctaataaatatgtagattgtaaggaaaaatttcactactctgttagctaaggtgactgctaagaagtgaggcctaggccaggcgtggtggctcatgcttgtaatcccagcactttgggagtctgaggcgggtggatcacctgaggtcaagagttcaagagcagcctgaccaacgtggagaaaccccatctctactaaataaagaaaattagccaggtgtggtggtgcatgcctgtaatcccagttactcgggaggctaaggcaggagaattgcttgagcctgggaggtggaggttgtggtgagccgagattgcgccattgcactccagcttgggcaacaagattgagactccgtctcaaaaaaaataaaaaaataaaaagaagtgcggtctagatgaatttccaagaggtgcccagtacagtaatttcattcaagcctctgttggtggaaatttcagtatgtttgtcttctcaaaggtcatgtttttttttgtgccatgtggtagaatcagtctttctgatttactcattagtcttttactaatcagaagacagttaatctgccaggatgttaataatggtgttctttattttaattcatgtaaattaaagagtctcacacagcccacataactccctaaaatcaactcttcaggtccaaatctcaagcgttattttcactgcagcaaatttgtcatttgcagtaaaaataggcagggtttttgtcttgacagtgttcatcctcagcaaaacattcattaactaggtcaactttggaagcttttcccttgttgtgatatgaaggatcaagtggtatgtctgagaaacatatgtggctgggaaaagaagtgggtagtggggtgtgggggagaagcaacctcaggctccccctccttccttgcttgttcccatttgtcactgctccgaagcacccaatgaactggtaggttgcctctgagcgtgaatcaatgagtggggtcaggaataaacaaatgacttgtgctagaaactgcaaaaaaacccacaaacacaccattaaaaaccctcatcttttggatactgtggttggtggggagaaggatgtaaactttcatacttccatgaggaaaaaaataaattttaaactgagtttgaagtctctatcaccttccctggataaatccagtcaatctgagacatagagcaaacctcagactcaacatgtctaaaaccaaacttgggattttcacctccaacagtgaggtcctttgccactgttccccatcatgtctgaaaaaaatctgtctgaaaaaaacatcttttgatgagtttttttgttttggtagttgattttctactccctccaaaatgttaccacttttactactctaatgaataggcaaatcacctttttttttttttgagatggagtcttgcaaattacttttttttttgagacagtctcggattgtcgcccaggctggagtgcagtggtgcgatctgaactcactgcaacctccaccccctgggttcaagcaattctcctgcctcagcctccctagtagctgggattacaggcatgcaccaccacgcccagctaatggttgtatttttagtagagatggggtttggccatgttggccaggctgatctcaaattcctcacctcaactgatctgcccgcctcagcctcccagaacgttaggattacagaagtgagccactgagcctggccacaaattactttaaggtaagaaattctaggtaagtgatgtagaggctaatgatccagtcagggtgtacctcagactgtgattggcacgctgttcctaaaggctgcctggcctgactgtgaacctaccttcagttttttaactatcagggattttacaaaattagtgtctcttaacagatagacaaatagttcaaactctagcagtgtagtcaaatcatttatatccatgtcttagaaccaactgggtggtaaagaactgggtcaataatagtcttttaagtgactgtccaactatgtcactgggggaacatttaaatttataacctaataaagggatttgtttttcagcctggttgcctcattttgaccttaagcaaatttgaccaaatctacagtacaaggctctacttaatcctctagtatgtgacctctaccatccaaggagctttagaaatggactttgaccttgctcacatcattgtgcctttcactgtactatttctatccgagacgtctaagtaattgtaaaaaattctggaaatcggcgagatgcggtggctcacacctgtaatcccagaactttgattagcagaggtcggcagatcacttgaggtcaggagttcaagaccagcctggccaacaaggcgaaaccccatctcttctaaaaatacaaaaattagccgggagtggtggtgcatgcctgtagtcccagctattcgggaggctgagccaggagaatcacttgaacccaggaggcagaggttgcagtgagttcagatcgcaccactgcactccagcctgggcgacaatccgagactgtctcaaaaaaaaaagtaatttgcaagactccatctcaaaaaaaaaaaaaggtgatttgcctattcattagagtagtaaaagtggtaacattttggagggagctctccagcctgggtgacagagcaagactctgtctcaaaacaaacaaaaacattctggaaattttccttcacaatttgcatggttggtttcaaaatgaagctactacagtttcaggtggttactcttcagggttttctcccacgacattataaatgtatgttcacttgcatatctacagtaatacttctgttttaattcagtatatctttataccctgtgtttttttagacagtttcttcactggctgtgggtagggtggggctatcacctactttgttgtcagagggacacccagggctgctgataattacagattgctctgaactttccttaaattaacatattttcctggttccaaacttaaagctttgaacttcatatttttaactaccttttaaaaaaataattacctttttcccagttgaaaatataacaacaactattctaaatggaggagtaaataatgataaagcaagctagaaaaatcatttgtgtttttgtggcaaattcatcatgtcaggaaggaaaactactcatttgcatgtttgtaaacaacacatctgatcaggtgcaattttaaaaagtgatttgtggtagctaatttttgtgtaattataagtgacccaaccaacaaaaacaatggaccaaagaatgaccaaaaaccatgtgggccttcctggacttgcccagaaatcatccatcccacctgctctgatctggcagtctggcaggccttggccagcatgatgtaagcaaactcggctctcgcagcaggagcatgattaatgtcactggttctccaacaatacaaacagcaacacttttaattacaaactgctcatagtgtttctcagcttcagagattttcatgaaaaacacagaatgtctctgattttgtttgcatatgatatatatgaccaaactcttattaaatgcaaaaagaagccctctttccccctcaaaactttacacagtgctgattctgcaggaagatacttcactcatatttcaggtacccagcactgcatatgtccccacatttgaggtgcatccattttagaaaccagcttgatatttggtgatcacattctgggtatgggtttaaatacaatcacagtaaattattttataacttggttcacatttttggatacaatatacaggccaaaaatatgcataattattctttaatttggctccaagagctttaatactgaaaaaccaaaagagctacagtactcatttctgatttaaaaggtaactgtgatactacaatatatattttttggtttttgtcccacgttcctggctcacagctcctataactcttgtaatttcctaagtgagccatcttttgttaaaatatttggccttttgcccatggttcctgaaacagctctgaggttgagttgatcacaaatggccaactcttttatcaatcatgcctatgtaatgaagccccactaaaaacccaaaagggacctatctccccttccccttcttcctctatacaaaaaaaaaaaaaaaaaaaaaaaaaaaaacaacccgcaaaacccacaaaaggactgaattcaggggcttcccagaaggtgaacgagaacacatctacctgctaagagggtggtgcaccaactccacagggatggaagcttctacacttgggatccatccagaccttgccctatgtatctcttcatctggctgttcatttctatcctttaaaagtggtccccaacctttttggcatggactgggggttgcgggggagacagtttcaggatgaaactgttccacctcagattatcaggcattagttagattcttataaggactacacaacctagatctctcgcatgcacagtttacagtagggttcacactcctatgagaatctaatgtcacctctgatttgacaggagatggagctcaggcagtaatgctcgcttgcccaccactcacctcctgctgtgcggcccagttcctaacaggccacagaccactaccaaccagtccatggcccggggattggggaccactgctttaaaatatcagggcatagtggctcacgcctgtaatcccagcactttgggaggcgaaggtgggaggatcacttgagcccaggagttctagaccagcctgggcaacatggtgagtcctgtttctacaaaaaataaagaatttagctagccatggtcatatgtgcctgcagtctcaattactcaggaggctaaggcaggaggcttgcttgagcccaagagtttgaggctgcagtgagtgatgatagtgccattgcactctagcctgggtgacacagtgagaccctgtctcaaaaaaaaaaaaaaaaaaaaaaaaaaaaagcaaaagaaaaagccggctgggcatggtggctcatgcctgtaatcccagcactttgggaggccgaggcaggtggatcatttgaggttaggagttcgagaccagcctggccaacatggtgaaaccctatctctactaaaaatataaaaattagctgggtgtggtggtacgcgcctgtaatcccagctacttgggaggctgaggcacaagaattgcttgaacctgggaggcggaggttgcaacgagccaagatcacaccattgcactccagcctgggcgatggagtgagactccgtctaaaaataaataaataaataaataaaataaaagtaaaaattaaaaaaaaactttcatatgggaggccaatgtgggaggatcacttgaggctaggagctcaagatcagcctgggcacacagggagaccccatctctacaaaaaaattaaaaaattagccaggcatggtgatgcacacctgtagttccagctacttgggaagctgaggcagaaggatcatttaaactcaggagttcaaggttacagtgagccatgatcatgccactgtactctagcctgggtgacacagtaagaacctgtctcaaatgaaaaaaaaaaaaaaaaaaatgccaagcacagtggctcacaccagtaattccagcactttgggaggccgaggcaagtgaatcacttgaggtcaggacttcgagaccagcctggccaacatggtgaaaccccatctctactaaaaaaaatacacacacacccacacacacaaattagccaggaatggtggtgcaagcctctgtaatgccagcaacctgggatgttgaggcataagaattgcttgaacctgggaggtggaggttgcagtgagccgagattgtgccactgcactctggcctgggcgacagagtgagactttgtcacaaaacaaaacaaagcaagaaaaaacgaaagaaaaagctgtataataaactggtaaacatgtttccctgagttctatgagccactctagcaaattaactggacctggttacgaggggttcatggaaactccaatttttagccagctagtcagaagcacaggtaaaacaacctggggcttgcacctggcattggaagtgggcagcagtcttgtgggactgagccctcaaacctgtggatctgatactatctccaggcagatagtgtcagaattgaattggaggacacccagctggtgtctgaggcagaactgatgacttgcttgatgtgtggggaaaaaaacaccttacatcttgtgtcagaagcgtgttgtgagagtatagcaggagaaactgagtctgtttttctactcatacacagtaacttaaccagagacagttagagaatgatggcctgaggtcttgcgactgatgcggatatctatacatgactgtgattccagggacaggccagagctatgccattctttagggagacacttagcacccctccatgcaagatcacaaagcctgagagtcattatggcctcttctaagccaactgctaagcctcagagcaaggatgtgccaggctttccaacatcaccactgccacggtgggacaatgttcagtttaagtgtacaggcttattccccatccccaacaccccttaaaaacaggttctagctttccatctcttcttggctggtagttctctacagagcggttctagtttgagcatctcttcttaactgtcccagttgcttcttagattctttctggtgccctgtaaataaccctttagtaccttgaggctctgggctgaggtcaaggttccaaaaatctggtgtgtgacatctctaaaggccaataccttttccccgctttaaaggtaattacataccatattctatagcctagaagatcttactcttttgggaaagtgaaaggctacaagaacatgcagaactgaggggaagcagattttcccatagaactctaggcatgttcccttttatgctttaagtgtagtacttcaatatactgaaaagtgtactcccttccaaactagtttctgcctagagatgattcccagagaggaggaatgaagttattggcttcatatctccacctaaaatgaggatacctaagagaccctgactgtggtgtatacactattcctggaaaagaaagaaggcctctctcacctttgccccttaactctccagcaggctgagtatggtgatggtactttgtacacctcaattttaactgtatatgacctctggcctattcccagaggctcttgtgaggcatcgtgacattcttgcctagagacataacctgccaacagcagctgagtcctcagatccgtgtctagtgtctagtgtgggtgcaccagaatctgcctggtctttaggctggcatcccaatgatacttgaccgtttctcagcagtcctgctgataatcaggaactcagccaggatcccagctcttaccttacccaaactgaactactcaagctcagcacatttcctaagagaatgatctggtcactgcctcctcattcttcaggtctcagcttaaatgtcatgtcatttttttctagaaagccttctctgacctggcagaagagcaaggtatctcagctatatgctcttatagtgccatgtaattttgctatcatagcatttaacatttaacacagagtattagaattcgtctttcaatgtggtaaagacagagactttttttttttttttgagatggagtctcactctgttgcccaggctggaacacaatgacgcgatcttggctcactgcaacctccgcctcctggattcaagcaattctcctgcctcagtctcctgaatagctgggattacaggcgcccaccaccacacccagctaatttttgtattttaagtagagagggggtttcaccatgttggtcaggctggtctcgaactcctgacctcaggtgatttacctgcctcggcctcccaaagtgctgggattacaggcgtgagccactgcacgtggctgaggctctgtcttttcactattataacctcagggcctgacatgtagtaaatatttaatacatatttgatagatggttattcatttgataattactgattggtacatctctgtatttggcaccatactaggcaccagagatacagtagttcgcaaaatcagacataatctcctgccctaaccaagtatacatactaattacctatgtcacaaactggcatagttatagctgtggtattatgaagaagaacctggtgctgtgattccccatagcagtgacaactgagctaagataagtaggaagggtgggacgttaaggagaagagaggtgggcagagagaagagcactccctgcagtagctgcaacatatgcacaggcttgtgatcagaggaatgaggacggcatgtccgacttgctaagggaagtgggatgaggctgggagatgacagggccgagaccacacagaagcttgtggggtaggttgaagcttttggactttaatcctaattacaatggtaaatcattgaagggttttaagctagtgggtagtagtgaagatggaaaagggccacctgagataaaatgggcagttttttgtgacgagtttgatataagggtgagggagagaggtatcaaggaggacttgtctaatggatagatggtggtgccatttattgagatggggtacaatggcagaggacctcactgttggaggtgaaaaatcacaagtttggttttagatatgttgagtctgaggttccagtaaggatgtgcatgcagttgtctaagatctctaggggtctgtactagaaatagaaatacaaatttacaagtcatctgtgaaaggctgttactaaagaagaggggcatgactgagatccattagggagaaaatacgaatttgaagagaaaaggtgactcaggatcaaagtctgaggaaggtcaccatctaatggctgggaagggagactgaggaggagcagctggagaggtggtagcagaagacaacagagagttcttggtcacagaacccaagggaaaagttaatttaaaaaggagatagtagtcaacagagaacactcacagggtaaggttcttaagaaggtcagaggagatgggatcaaaggcatagatggagaaactggccttagacttgaggaaggacagctgctctattatagaaagcacaaaggaggatactggtagatttatttcttggtagtgggaagctgagggaattctattttctctgtgaagaggtcagggtctctaccaagagagagggggagaaagtgtggaccagaggtttaaaaagaatagagtgggaaagatagttgaccatggaaacatggaaagatagctgggccatattcaggacctatctgaagtgggtgatcatgaatttaaagtggaatcagctgggcgtggtggctcagcctgtaatcccagcactttaggaagctgagatgggcagatcacttgaggttaggagttcgagaccagcctggccaacatgatgaatccctgtctctactaaaaatagaaacattagccaggtgaggtggcacgcacctgtaatcccagctactcaggacgctgaggcaggagaatcacttgaacctgggaggcggaggttacagtaagctgagatcacgccactgcactccagcctgggcaacagaatgagactccatctcaaaaaaaaaaaaaaagtggactcaaggccaggtgtggtggctcatgcctgcaattccagctttggaaggctgaggcaggagaattacttgagcccaggaattcaaggctgcagtgagctgtgattgtgccactgcactccagcccaggcaataaagtgagaccctgtttcaaaaaaacaaacaaacaaaaaccaacaacaacaacaaaaaaacccaaaacccaaaaaccagtggaataaatctgccctgttatgttcttttttccagcagtgcttgttgctcttgagtacacacacagaaaacatacagttaaatgaacaaataaaggaaggaccaaacaggtagtagaagacaaagacacttgacagacttcaggaacagaagcaatgatgaaggacaaagtcttctactgctgtggtaagaactctattcctctatttgacccacaaatagcacccacatcccactgctaacctttagtagagctggaggctgaagcaggtcgagaagatcgtttacgatgtccattttccacactttcagaggccacagttggctcttcagttcgggagtttcttcggcctgggattttggacttttcaactatctctttgggctcactgctgacagagggaagcaaaaagtttccaagcaggtgagggaaccaggccacacaaaaaacgggctcttcagatagtttcattcgtaaagtaggagactaagaactatatagttattctggagagaaagcagttcaacctggggtaataagcactattgccttctatgttactgggggtttaaaagtgagtctagcttattacattagtaaaaataaaatagtaaagcataatgttggtgaaattgtagaaaaactggtaaaagacataaaaaaattggaacaaaactcccctaattcctcacccattttcttttcttttcttttttttttttttccagacagagtgtcactctgtcgcccaggctggagtgcagtggcgctgtctcagctcactgcgacccctgcctcctgggttcaggcaattcacctgcctcagcctcccgagtagctgggactacagccatgtgacaccacgccctgctaatttttgtctttttagtagagatgggggtttcaccacactggccaggatggtcttaaactcctgacctcaagtgatccacccacctcggcctcccaaagtgctgggattacaggcgtgagccattgcaccaggcccctcacccattttcctaaggtaatagttcccttcaaaaattaaaacattttggattttgtaattttttagaatcatgaaaatggtctttaagatgtctgaaaattgctattaactcaaaatagtatataaacctaggaaattattaacatatattggcatttactaatgatcccggtagagtcagataacagcatattagaagccacagtatggggataattcacaatacactgctaggtatattgattgtccacaccccaacccccttttcttagtatatgaagatttaaaattggtaatattcactgttattgaggatacaggaacaaaaacatttacatacactcctaactggagtgtaaattgtataacccagtggttcttaaaaggaggcaattttgcttcttaggggacatttagcaacatctggagacatttttgattgtcacaacttggggagaggggtgctaccggaatcttttgggtacaggccagggatgccactaaacgtaagccccacacaacaaacagttatctggccccaaaggtcaataatgttgaggctgagaaactctggtgtaacccttgactcagcaatcccacttctaggtgcctaaggaaacaaatctttttacagagctccacacataaggaagttaaaacattttatttgtactagtgaaaacagaagacctaaatacctaacgatagtagattagttagctaaatcatggcacatccatatggagtcatgaaaaatcatgttgtagattatttaatgacaaaacgatttatgacacattaccaagtgggaaaaacttaccaacacaatgaacagtataattccattttcattgttgtatgtgttgagtatatatgtaactacatatgaataaatatgagctatatacacataaatcttttgttgttgttgtttgtttttgagatggagtcttgctctgtgccccaggctggagtgcagtggcaggatctcagcaaagtgcaaactctgcctcctgtgttcaagcaattctcctgtctcagcctcctgagtagctgggattacaggcatgcgccaccacgcctggctaatttttgtatttttagtaaagatggggtttcaccatgttggccaggctggtctcgaactcctgacctcaaatgatccacctgccttggcctcccaaagtgctgggattacaggtgtgagccacaacgcccagccctatacacataaatctgacacaatatatttgggtgcacactgtgtgaaaaagactagaagcagatgaactaaaatatatgtacagtgaatattgttgagttgtaggaatactagtttactggtgagttattttcttctttgtaattctctgatctgaatttctggttttctttaataattttttacactttcatggttcaaaaacgcatgttaaaatgatcagaaaaaaaattctttagaaaattaaatttgcttgcaagacatgtaacaaataaaaataatgcaacaaaacaaaacaaaacaaaacaaaacaaaacaaaacaatactggtcaaaaggctgcctcttctgggaagtcttccatgatctcatttcccaagtagagctgtctcttttgtctcttgggttcacagtctttatctggcattctagagcacccatcagattgtacatcgtgttctattttaatgttttgtgtcttcaactagactgtgaacctcttaaggacacagaccataacctgactgtcaactatccctacccttccactgttcactcctgccagaggaccctttgctagtagcaccgtggttgggaactgggacacaccattcactcccatagctttatgtataacagccgcccgacacccaaccataagccaaggtaagtcaaggagaggtgaggctggagctggggtggaattacaagtcagggggatttatacctcctttgagaggtggtgaagatggctttctggctaggagctcagaaaatggtcaaagcttctgaggaaagaaagttctttttttaaaaaaaatttttgttttttttttgagacaggatgtcactctgtcccccaggctggggtgtgggtagtgcaatcatggctcattgcagccctgacctcccaggctcaagtgatcctcccaccttagcctcctgagtagctgggactacaggcaagtgccaccatgaccagctaattttttattaattttttattttttatttttttttcatagagacagggtctccctatgttgcccaggctgggcaactcctaagctcaagcaatcctccctccttggtctcccaaaatgctggggttacaggcatgagccactgtacctggctagatgattcctaatgaaagtgcctctttctcctggcaaaacaaaagccacagcaagactatcctgttttttatggtcaatgctcaggtatctctggaaacaaacaccccaaatgtatttttggtctgattagcttctttctctagacaaatagctggtgcatgcttgagaaatgcagatgaattcaaacattagcccaatccaaataaaatcagacaggcagagtggtatagtaggagtagcaatgaatttggaatgagatgaacaggggtgaagtcttagctatgcatttattgactatgctatttaatgctctatgttctagacttttttttttttttttttaagatagagtcttactctgttgctcatgttggagtgcagtgagcacgaccatggctcactgcaacctcgacctccctgggctcaggtgatcctcccacctcagcctcctaagtagctgggactacaggcacataccactatgcccagctaattttttgtatagacagggtttcactatgttacccaggctggtctcaaacacctgggctcaagccatctgcctacctcggcctcccagagtgttgggagtacaggtgtgagccactgagcccggccgttctagactcttttttcttttcttttcttttagacagaatttcactctgtcgcccaggctggggtgcagtggcatgatctcggctcactgcaacctccgcctcccaggtttaagtgactctcctgcctcagcctcccaagtagctgggattataggcatgcgccaccatgcctggctaatttttgtagttttagtagagacggggtcttaccattttggccagggtggtatcgaactcctgacctcaaatgatctgcctgcctcggcctcccaaagtgctgggattacaggcgtgagccactgcacccagcctcattctagattcttgatctataaatcccatcttgtctgttgcaatacataggttaaatatcagggctctgaagtcagaaggcttgggtttgaatctaaccttcaccatttactaattctgtgaccttgggcaatttagttaacctttctgaactttagatttctcatctataagacagaatttactttcctaatagatactgtgaaaattagatgagataacacatctagggcacttgtagctcaatctattaaggatgcatggcatggaacaacattcaaataaatggtggctattaacctcctcacagggatgatatgaagattaaatgaaaaaaatattgtgaaagtgtcttatgaagttgctgtacaattatgagaagttctttaaaatattatccagtgcattcctacactaaaagagacaagactgtgtgtggtggctcacacctgtaatcccagaggctgagacgggtggatcacttgaggtcaggagttcaagaccagcctggccaatgtggtgaaaccccgtctctactaaaaatacaaaaattagctaggtgtggtggtacatacctgtaatcccagctacttgtgaggctgaggcaggagaattgcatcaaccccagaggtggaggttgcagtgtgccgagatcgtgcaactgcacaccagcctgggtgatagagcaagactctgtctccaaaaaaaggcatgacttttggaaaatggtaatattcctctccacagagctaatgaagttgaagccatagatgtatgtcattttgtagggttatgtggagcagcacagtgtaacagaaaaaagcataggttttgggtcagatcctgcctggctttctccttcttttgctttcagggtcaaacaactgttctttagaagacagctgcaaggactattattaatattaatatcaatggtaacaacagctcccatatattgaacatttactatttcctcattatgcagaacatgttatctcactcagctttgaaaacaaccataaaaggtagaaacttggcctccagcttttattaagagaaatgttacctctgagggattaggactcatgacagctctctacgttagcagtaaaaacagactggtgcaagagtgaaggaaaaggacaaggtgaagagaggtttaaagactgagacagctgatacctttcaaagaggcttatgctgtgttcatgctacgtctgcagaaatgatcatcttacctttgtccagagactatggcagcatttacctccagctctgcaaaaaaatataaaggatagaaatgaaatgtgggagctgccacagagagaagctaggagtctacaagaattctctatgccctatttaggctaaagtgtccctgtgcccagcaggattctcaccctacatggtatggagacaaagctggcacagatacaacttggtttgtttgggacataagacacttggtctatttttatttctactccacatggtgaaataatctgtttggattaatagaactaagttcacccttccttgttcatatttcatccagttacaaccaggttagcaaaataagtctcttcctctcatgtggaagagaccgttttcattttaaaacatctccatccaccttgttgccacttttttaaaaaaagcaatcttcaaatatgtcttgaacatctattaaggatgcattcttctccaaaggacttcctcactgagttttagagggcacagtgctttgctttcagatattgcctttacaccccattctattcctttctttctcaacctcccagcaatgccctccaagcaaggaaaatcttagtaatctgtctagcagggttttccatcaatgagcacactctgggtttaccatgcacttcttcctcagcaccagcagaaaaacatttgctttctctattatgtgcctttaggtagttccatcttttccaaaagccttccctgatgtaccagatagcagtgatctatcctgcctctggcctcccacagccctattcctgttcccccattgagggaagtcagcacctcattactcagtgtacatgtctaacctactctactaatcacatggtaaccttaaaggcaatgaagtcagagtgcctggttcaaaattttgacttcaatgcttattagccatgtgaccttgggtaaattatctgacatctctgtgctcaatcccttacctaaaaaatgggaataatcacattacccacttcaaagttaaggagatgaaataatgcatgtagaaattttagtatggcacctgacacttagtcataactcaatgttattagctattattattgctatgaagatcagattgatgcagcctttcatgtaaggaggttggactactctgcctttaatgcaaggtgctagtagaagggaatctttgatgggaggctgaggcagaggaatcccttgaacccaggaggcagagacttcagtgaaccgagatcatgccactgcactccagcctggtgacagagcaagactctgtcccaaaaaaaaaaaaaaaaaaaaaaaaaaaaggaagggaatctttgcttctcattgctgtttagcctcctgtatttgtacccacaaagcctgaaaacccatccacaaaaaatagataccaattcactgagtctctgctactttgctggcttggctggaacgtataaactcaggtaatgtgtgctcaaaaatgaaaatgactcaagtcaaaagaagtgctcaccctcattgttttttatttttttgagacagggtctcactctgtcccccaggctggggtgcagtggcactcactgcaacccccacctccagggttcaagcgattctcctgccacagcctcccgagtagctgggagtataggcacgcggtaccaggccagctaatttttgtatttttagtagaaacagggtttcgccatgttggccaggcttgtcttgaactcctggcctcaagtgatctgcccgccttggcctcccaaagtcctgagattacaggcatgagccaccgcacctggcctatttttattttttgggggatggtctcactctgtctcccaggctggagtgcaatgggatcacagctcactgcagcctcaacctccttggggtcaggtgatcctcctacctcagcctcccaagtagtatgcatgccaagcccaactaatttttaaaaattttttgtagagatggggttttactatgttgcccaaggtagtcttgaacccctcggctcaatcaatcctcccatctcagcctcctaaagtgctggggttagaggcatgaaccattacacccggcctagtttgctcttcttttttttttgagacagagttttgctcttgttgcccagggtggagttcaatggcgcaatctccggctcaccgcaacctctgcgtcccaggttcaagcgattctcctgcctcagcctcccaagtagctgggattacaggcatgtgccacgacagccagctaattttgtatttgtagtttggggtttctccatgttggtctgggtggtctcaaactcccaacctcaggtgatctgaccgcctcggcctcccaaagtgctgggattacaggtgtgagccaccgcgcctggcctagtttgctcttttaaaacaagaaaaagtttgatgcttttgagaatcttaacactatcactgctgattcacaagtagagatcaagaaggtttgatgaaggtaatcagtggctctgagggatgttaaggataaggagattcatttacgccagacttccaaatggaagaggattcttcagccaattactgtgagaagggggaaaaatgatatggtaaatcctattttctagagtagggttggggcaggaaatggaattccctttccctttagagttactccttttcttaccaaaaatgagttttgctgtatgacccctcctttaaataacgtgctccattcctacccttctcaaatatccaacacaatgtcaggtatcatgtgggcaattggcagcaaagaaagaatctgggtggctgggccggaagtagtggctcatgcctgtaatcccagcactttgggaggacgaggcaggtggatcatgaggtcaggagatcgagaccatcctggctaacatggtgaaaccctgtctctacaaaatatacaaaaaattagccaggctggtggcgggcacctatagtcccagctacttgggaggctgaggcaggagaatggtgtgaacccaggaggcagagcttgcagtgagccgagattgcgccactgcactccagcctgcgtgacaaagcaaactccatctcaaaaaaaaaaaaagaaaaacaaaaagaaaaaaagactctaggtggctgaaatgttttttgctcgcacactattttcagaggcctgattttattcagagtgtgcagtagaaagtcctatcagtcacacaggatgtagcattctgaagtaggttttaaaataatcacaaactataccttacttttactggctcagattcacaaaattaagcatggctactattgctttttcttactaactttgtcaagtgtgtgaattgtagtttcaatgagattcttacctctgtggggaccagtcatacttttttttttttaactcctcaatgatctacagtgacaaagaatcaggcgaaactaaactgtaccatatctgcgatatttatctgcctccatagtctataaaggcaaaacaagggctgtggctgccatcatcctcatgtattctgagctgaccctgatcccacagcagttatttgtcagattaccatgggatcctacttccagaaatatcatcccttgtgctatttacaatatattggtcatggggagaaacttaatgccacccagagacgactgaaatgactctgcctccctggaggaatggctatcacattgtggcagagactcaatgaacaagactccactactgtcataataaaattacaaagtgcgttaatgcttgccagcccagtaagtcaccatatgccagctattcagctgccaaccatgggtgccagggtcacagaacagggaaaactctgcaacagaaacccatggctgggtggcagacagacaatgggcacggaattgcccttcttgagttccctagctgacactatgaatgcatgagagagcaagctggtcggggggaaaataatctcaagtagaactgcacaagctttgtcactcaaccaaagtctgctctgaagcaaacagataaaatagttcctgtcacttcctggcataagaacacacgacattgaggacagcagtagttccttcacatgtaacccatcccactccaagaagtttttccaaagtacgccttacctggtctggcaacagaggcctgcagtgctgtggttgaagtttcctttgagactaaattctgcgacggggctaaggcaaggaaaaaaaaattacagaccttttactttcttttctaaacaaaaagaaagcattaacctaatcaagggctaagtaactgctgaaacaatgtactcttagagggcagtactcaaaattggcctcgaaattacaagtacattttaaaacttactacaaaaattaattaccataacacccagtaccaatgactaccatttaggggtataggctcttcctttttgtatgtataataataaggggaagagatggctataagaacatagcactcacattttctgcttcttggggtcaggtcctgaccactacttgaaaaagccccaaagcatatcttagtaggcaacccaaaccatagaggtacaattataccattcccctcagcatttaaaaaatctagcctcactccctaaagactatactctatgagagtggaaatggtcacataattttgtacttttctatagcacttagcaaaagtgatgggcataaagcaggcattcaattcatacataataaataaataaatttgatatgttatttacttatctaacaaatagttgcaaagaacttactaggggcaaggcactgtgccaggtaccctgagagaccaaactatatcctcttgcacatcaggaactcagtctagtattaaagataagatatatacatgtagtgcacttgagtgcactctgatgtcatatgaaggagtcacaaagtataaaatactacaaaagtccaaagcaagagttagcaattctaggttgagaaatctgaaggtacattaaagggagaaacatcagaatcaggcttcaaaggacacagagaacttaggcccttaaggaatggaataaaatatgtaatgccctctagaagggaaccatcctggaagataaagattatggcatggatatgccacagtcacatcttgacatctcagtctaaaatcctagataaactctgcaacaacatgttttactctcttgtggaaactgaattttgtatatttccctccctgcttagcaaagcagtaaattatgcatttgtgtttaagaatttattttggatgcttatctgataaagcttaaaactatatcttaacttctacttttaactttagtgttcatttctcaaatttccttttctttttctcctgagacagagccttgctctgttgcccaggctgtagtgcaatggcaggatctcggttcaccacaacctccgcctcctgggctcaagcaatcctcccacctcagccttctgagtagctgggaccacaggtgcatgccaccatgcccagctaatttttacatattttttttgtagagacagggtttcgcctcattgcccggcatggtctcaaactcctgggctcaagtgatccaccagcctcggcctctcaacatgctgagattacaggcatgagccaccgtgcctggccaatttctcatattttcaaagtaaaagcacagaagccccttgaaaaagaacagaaacaatcacttataagcaaagtgagtgttcttaactaaaattgagaacttttcccaagtgctggttcatctcctcaaggcccacatatttctctagtataatatatgatccagataaaaataatttctaattacttcatcatttttctcttgataccagagggaaaagtctcctgaaagaaggagaaatggaaatacttaatagtgaaggatatacttaatttacaccaggttcccttttaattcttagggttcatctacaccaacagaactagaacaatatacaataagcacccagtcttgtgaagactgtctcttgtaagagcagcagacttcttgaaggcctttatcctgcccccatctctctaacactgaggtgaagaggcagagagaaggggaattaacctttccagagctctgcgtgaggcagtgtgttggccacttgacaaatcttctcattgagtcctctctcagaatcctaaattctgggaggtagaatgtacgatctccattttacaagtgaaatacatggcttaggagaggttaaggaacgtatcaactgtaactggtaaccagtgggctagaatttgaactctgatcttaccctgaagtttgtgttctttctgcctctcctcctgggtgcttaccactcagtggtaggcactcgaagcattttagctgcataaataagataggcacttaattagctggcctaggatatcgtaaaggtctttcccagctctagcagtgtgtgactgactccactctggggaaatagagcttcttcacttaagcctcacaggaggaggaacatgtcagggaagggaagaagggaaggaggggcggttgtaaggacacctatgcttccatcattagcccatcttaacagtacataggaaatagcctgaactagatacacaaatggaatgtaccaatcaacaaagagattacatcaaaaagaaactgggaataacaatttttaccatttattgaataataattatatgctaggttctgtgctaagaatgttatatgtactaccttattgaattcttacaactattattgttccatattacaaaggaggaaaccaaagtctggagtggtcaagtaacttgcccaagcccatatagctggtaaatgctggtgttataataccaacccaagcctactggctcttgaccactttgtttctactgtgtccattatcatgaaacccagttttcttccagctctcctctagagtagcccagacaaaaaaagaatggttcctgagatagagtacagtgagaatggggctatgaggacccattgttctgaaatagtcatgagcaaatcttcaccctggtaaagagaatctgcagaagctgctgttcacacttaaggcacagtgttaaatgggaggttcacagtatagactctgaacaaacactgaacgtctttgagcttcaatcttctcacccatacaatggggttaagaatatctgacatagttggtataaagatgatgcaagacaacatatgtaaaaatgcttccttataaattgaaaaacttatataaatgaaaggtatcattatttcaggaactctttgttttgagagccttagctctctgttttgtttttttcagacagagtctcgctctgttgcccaggctggagtgcagtggcatgatctcagctcactgcaacctctgctcccaggttcaagctattctcatgcctcagcctcctgagtagctgggattacaggtgtgtgccatcatgcctggctaatttttgaatttttagtacagatgcagtttcaccatgttggccaggctggtctcgaattcctgacctcaactgatccactcacctcggcctcccaaagtgctgggattacaggcgtgagccaccgcacctggcccttagctctctttaatgaatgcaaacttaacatgggatttaaaagcatattttccaacgtactttcaataaataaaactactgctattgccatttagcccattctctttcctccaagtaaaaaaggagtcatgctttctcttgtgggattaggtcatcaaaaaactgacacaaagagatgatgaagccccaagtacatacctatgctgggtagaagttctggatgggatcccaccttctcctccactaggccacccgcaagtgactcagatgctatgccaccatgattgctttttgtggtcggtacggcggagatgagctcggagggtaccagagtggttactatcgagcgtacactggtggggagagcaccgccaggtaagctgggtcctgctgaggcagtgcccgggcccacagggctagaggtcatttttagcagagtgggtgctgggggcgttggggttttactgtccagctctgtggataactgctctgttcccatgagccccggagctgtggtgtctagcccttggccttcagtctctccatctgcaccatattgttcttcccctttctcaagagagcctgtaactttcttacatgccttggtcaacaaaatttggccaattttgtccacttttcctttgcccttactagacgagactgggcttcgccggttgccagaggaccctggactattggtcaaaaggggagaaaccattgtggttgactgtgaagagggaagagtgttctgatctgctgaggtgttcacctgagggctagcctcatctggattcaattctttcacttgctgcacagggggatgagaagggacaactggagaagacgtacaaggaggggaaggaagctgaacaggggtggctcgtgagctaaggaccaaaggtcgacctgtctggatgtttggagcaggactactggagagggcattaggcggtacaggagcagaagaaaattttatgttctgaggtatgtgtaaagggccaacaactgcaacagagggaggcatcaggccagagttggttgtcagtggggctgcaggaattgtgcttggctgtgatcctttcataacctgaattattgaggatgaattgataaagacaggtgtaatgaactgaggccgggcattagactgagcagctgactgtccctcagaaaccataaccttgctacccgcattgggcattgtgacaactgttgacatcaatgcagactgcaagtgagttggcaaagctgctgatgtgttagctgaagttgtgatgggattggaagtgacaaatacagttatttgatttgggggcaagggagtggaaatggaggaagagctaacaggtcttgacattactggagggatgcttggtgcaacgttagaactgacctcactcaattcgggatgcacaagggatgaacacagctcattactgtgaggtaagtttagggaattagaaggttctttagaagaagacagatcctgcagtgtgggaatgacagatgcttttttgaggtcctccccagaaactactggaggtgttacttccagatctgtaagcccagggggtttaattgtcacattgggagctccagagttgtcaagaagttgacttaacgatgttggtgcttccctcatagcaggagacaccaaatttttgttctcttcgacactgggaagtttgttaggatccgaaggctgcccatcctttttggactgatcttcagggacaaccattttaacttcttgggcagggactgcttttagttcaatgtttacctgttccttcctactctgggaattctggcaatcactgtcctgaggcacattcaagctctccttgttatcctcaacaacacccccaactgcagccacagacacagtagaattctgaggattcagcccactgttgttaggaaagctcccaggtacagggggattggccagaggagtgggactgaccaatacatttctcggcaactccacattctgcaatagggctgcatttgtctgagaggccagagtaagtttaggggcttttgaattttgcctcccagggcttggagtggttttcctactggacccaggactagacctgcgactgttgcttggacttgcccgttttgttgctccagaattagactgctttccagaattcactaccacagaatctaatttgtgagtttgtggggtagcaaaattggaaggattcatggtaagatttgaaggtgcttgcccgatggccttcaaagttgttggatttaggccttgttgatcaaagcccctgtttaaatttggcctaggaggtaaaggaatattaatctgtggagggaagagtcctgctatggaggcattgagtctttctggtgacagactgatttctgaaggttctgtgctgggagggcggttgttgggtgtctgaggataatagggtctggggctggctctgtttggtgttttgggcctagatgtctgggttggcgcagccacatttgggaagtggtggccgtgagagctgggcagggaatttacagggggttgctggggagttgcaccttgagttgctgaaaggggcgatggtccaggttttggccctgtcatcattaactgattctggggaagtactacatgtgaaggcatgttgtttgggcctcctgggacagatggtgcttcactgccacttgcttcagggagtgaggccatctccgccagtggcgagctggaaggattctgcgggctctcctgatagaccattttccttgaattgcttcccaagggagtattcacaggcattggcattctttgtttatcaggtgatggtggcacggaggcaggtccttgcagactgaccatgacaggcacactgccactctgttgcatgggcattctctgggagtcggggttcagggggccccttggaggatggacattttgagagactggaagcctaactgatttgggatcctgctgcatcatgagcatcatcatcatttgttgctgctgctgctgctgctgctgagactgtggctgactgggaggtggtggctgctgctgctgaggcagttgtggctgtggctgctgctgtggtggctgtggtgggggtgccacatgctgcatgagttgaggaggcatctgctgaagtggcctctgttcaactggttgagaaggataacctaaaacaagccccccaaattagggaagttagatttttcagcaagaaaatgttgctacctttagagtatagccaagcaatactcatctaggtggcacagactatgcacaaacagctcaggcatgcccactcctggggcagggggcagcccctcattacttgacataagcaaaaggggcacagtgcttaaggaagcaaaaagcaaagcatcaaaaaacctggagctcctcggtgtgtaggatctgaatgagccatgactgtactaagagcctgattttctgtgctatgcactgaaaatggctgtgtctataccagccaaacattcagatgaaatgagaaaaactccatcaacatcaagtgcctggccacccaagattcaggtctcatgtagtcataatcaatatttcaatgtacttgtgaatgaagtaaagcatttaggattcacttcttctgttagcacaggaataatttttttaagatgtggttttgttgaaaataacagcactgaagacagcctttttattctttcaacagaagtaaaatataaaattctaggattcagttccttaagaaagaggaatttaaaattattccaattcattggctccatacactacgccgcatccttcaggcttaatcctttgggggaaaccgactgaattaaaattgcccttcaggtgtaaatcagtttaataaacagtaggagctaatggaagctgatatacacattgaaaataaaattagggcattgaagtttttatggatattaatttgcacttactttcttacatgcaaatctctatttggagaaatattttccatgaatccacagctggagaataagtaaggcagaagcatagccctcaggaataaaaaataattttgggaaaagaactctgaaggacaatgtcttctagatatgcagagggcaacatctcaaattattctctttttttgtgaagattttacttggcattttagaaccaaaaccttacaatcagaaaagataaaaagatacgcaaaccaagaataacggtggttctgtgggaaaaagtgggcatacagctgggcatatatgggatacaattccagttccacaaactagatttattccattgttgcatgaagagtacattagggaggttttaagaaggtgtaggaataagaacaactggctctggcagtcaaaagaaatgctgactcaacattttcatagagcagctaccaaattttgtgggtcagactcagcactcaattaatgtcttctggccaaagatttccatggtatcaatgaatacaatgtgtagaatccagttttgaagatttttaaaaaaatccttttttattttaggcccgagtaacttcttcacctttataaagccaataacatggcatttctatggttcaactgtcctttcgactacatagtcaaatacagtgggttcctatttttcacattcagtctggggttcccacattaagaaatttgtaattgctacaaaagcctgttgatgtcagggttatgacatggatgccttttatctttaaaatcagcccaccagacagtaaataccaaagaggacagcatagacaatatagcagcctctcaaaagtaacagttaagggcatggctgctacagagtccagaagctggaggcagcagtccaaaaggcactaatgataagacagattggggctgacgtgacagaatggtgaagagggaaagccaggacacacatagtgcccataacacaatcacaaactgaatttattactcagggaatgcaaactcctatgcctttaggggccaggcaggtagtagagaatagaagtggactggtataagacagcaggagtcctgtcaacagtgccaaactgcagagcagatgccctatttaaaggcatttaaactcggacttttgtttaagacactgcatagcaactcaaaaccattataggccaaattcagcctgcaggcccccagtttgcagaaagaaggcaataaatgtatacaaagacccctgggattcttataagaagagttcagatgtgtctgaggcaagcaggcatgttcctgctctcaatgccttctggacatactccccaaagactgatgacctcccagtctcagctatgctgctgcatctcactgacgggaagtgtgatatgcccaaataatttgtaataaataacacaaagtattgatatcatgatggatttagctttttgtttggattcaattttaaaatacataaattaggggtagattaaaggttactcctaaaataatgtcgctctcattttcatgccaaaaagaagttgaaataactagtgaggaagaaacaaaacataccctctgtacacacaggggagagtggcctaagtgtgaagggttgtgtatcttcaaccgtgtcataggggaataaagttacaagtcattgctcaggccaagataaccaggtatagagatattgtggcagctggccttggttctataatatctaggtttgaatgaattaattttaggagcttttccatctttgacataatttttcaacatttaaaggatagtattattttataatcagagaggatacaacaaagggggcttccaatattggtcctatttattataaattattaacctatgtggtagatacatgggtgtctcttttattctttatatcttctttatattttaaagactcattaatgaaacttctataaaaaagatcatcttgttttaaaccctggtagttccctgctttgagaagccccaggaagaaacgctgcaggaaaggcaggcaagcaggattagagtgaaatcatctctccatttaatcttatcctgttctgatgccaactagaatcttgacattgacaagaataaagaggcacttcacatttcatggtttttttttttttttttgagacagggtcccaggctggagtgcagtggcatgatcatggctcactgcaacttcgacttcctgggctcaggtgatgctcccacctcagcctcctgagtagctgggactataggtgcgtgtcaccacacctggctaatttttaaaaaatttttagtagagacaaggtttcaccatgttgcccaggctggtcttgaacacttgcgctcaagcgatctgctcatcttggcctcccaaagtgctgtgattacaggtggatgagccatcatgcccaaccacatttcagtccgattttatgaggacttaaaataacaaagacaaatttgaatagaatgtgtgtgtgtatgtgccttcaaaagttatatttgaaatttttacttaatatcaaggcaaagcttccaaataccagacacattaaatcactgaagtagactagttagcagataaaataaaatactattgtttccttgaagacatggaagccttgtaatgccacatgcacatgtaataagtatataatctagctaacattttatcacctggtggccggtttgaaaattctggcagtttagggcctgagttatccaagttaattccttgttctccaggcaacggtggctgatcagcctcttccagaccagctgggcgagtatctggggtgctaaaaaaaaaaaaaaaaaaaaaagtgacatattttagaataagttgtatagaaaatacacaaaactagcttaacccttcccctatttctgaagaactaaaatgtttgcattaccattattcatctctctctagtctagataaaatattaaatattggcataaaaataatctggcaatttcattaaatgttaaaatccatttaatctaacagcactgtatttactcagaatgctttccacaaattcctggtgcaataattttcatgtaatcacccattccttagctgttttaagacctgatcataggactatcaatgttacaaggtactgttcctgtgaaaccacactatcttcaatgtagcgatcaaattcaactagggggtctgattgtttcttttttgtggatataacagtgggggctcaattcataacaccttgcaaaaggttgtataggttggctgatggtattcagagaacaaagaaagattgagaccaccaccacaaagattttgctgcagaatgagaatttgcagacatctctatttgctttgagatgcctttgcttttacctgggtgtagcttaaaatttttagtaaggaagaaaaaaatgaagaaattgtagctactaacacccacattctcaaagaacaagactggtcacgggcctcattttgtttgtaatctcagtactaattgtacttttcttttctatctttagtttccctttgccctgattttgttcacccacttttaggtagtgttttgtctcattatactctgtacagtttcataagccacaaaaatccactttaaaagcctcccagcaaatggaaatttagaacctgaagcagatcgtcagcacatccagacctataacaatttgctccttgtaagacttctctctcactttaaattacaggcaagaattcagtggtaacctttactttcagaaaattgtagagataagaaatctcagatatctggtccagccccatcatgttatgaatgagaaaactaaggcccaaaaaggtgtatgaaacaggcccaagattccacagtgaagtagtggtagagctggaagcaggtacttttcctgtaaatccactgtctccctttcctgggagtcctgatgctgtgtaaggtccctttcacaatttgtagacctaagtaaccaatttccctaagggctggtgaagatggcaaaaaatacacactagaggcaactgaataaccttgcaattttactcccagactaccgagagaataaaatatttattaaataattattcccataggttgatgctagtaaagaatttaactgagaaagagctatcagaaaaattagataattaactttgaattcaggaaaatataggttatcattaataatacaccatgattagcttttaaagcataagattcaagaagaggcaagtgagcatgatataatacagtacaaagaatgttgtgggaaggctgggataaaggtagttggtttaattttgaatatttaagctggttgaaataaagtttcttgattctttttctataattctaacaatttatttcaattaacctgttttacattcattagccattatttcctcatttattatttttttatgattaaaggcacaaaatatagctcagtgaatattccttctggaaacattttatcaaacccagaaacacaaattaatacttagcttcaggaaatgaaatataaattgttaattgcctttcctgctatgatcttgcaaaataactcacctggagaacgtttactgaaagggtaactgatttaaaaggtccaatcatcttagcgtggggttttaagcttctagggatgataaagagcctttaaaggaaaggcacctgtgcaaaaaaaccatttctatttgagagacagcagtagttttaatttccaaaacacatttggcctctctggttccccaatagccatcataagcctaaagtcagtgctttgtggagttgccatatggtagcactggttacttttcaggctctgattgccaaaaccccccgacactgtaaaattaagagatataccagccaattgcaacatatgaatcttgtttggatccttatttgaacaaattgtaagaaaaaaatttgagataatcagggaagtttgaacactggatatgagagtactaaggaagtattagttttctaggtgtgctaacaatattgtgcgggcatattaaaaagtgtccttatcttttagagacacacactgaaatatttacccagcgaatttgctttgaaatactcaaaagggtaatggaagagagtacagatgaaggcaagacagactatgagttgataattattgaagcagggggatttcattatactattctagttttatattctgtaaaattttccatcaaaaaagttatccacacagaaaacaaatgaataaaatttgaggcaaaaccatcacaacctactttagatcttgctgactatttttcttcttccgagggggtttcttcttcttcggtttatttgcgttggtattattttgcttattgtttaccccaaaatggcctgcagatatgtcactctgcaataagttgaccaacaatgggctcgttagcgtgacatccttattgactgggaagcctggattttgaccacaggacatctgatttccattgggagctccactgaaaggtgcattgaaagacatcccatggcctgagaagtggtttcccgaggcactgtttccctgcatggcctgcacatgaggggggaccatgttggtttgttgaatgctaacatcaggcatcatctgagataaactgacatcgttatttgctgtagtagcaggatcaccatgctgctgggccatgtgtgggctgggccctggtggccgcaggacctgtccctgaatgcccataacctgagatggactgttgttcacaggcccttgctggggcagcatctgtcctgacatctgtcccgtaaactgcaccatatttccttgcatgtttggagttggtcccctcattatctgggctggtcccggcatgacattggactggttctgagtgttaaactgctgcttattcccctgcatttgattggtcataatctgctctatcattgggttctgttggagcaaaacctgcccctgaggccccatcatctggttatgtggcgccatcatttgtgggccctgctgggaaagcatctgcttgggtggggtcatcctttggggcgagggcccaagattttggctcggggggttcaccatcatctggccctgtggcataagctgggcccttgaaaggatcatagggttctgagggttcaaggttccttgttgctggaccatctggccctgggagggcacgatttgctggtgcatgcccatcagctgagatggtgggccctgctggggctggccttgcatgttgctgaggttcacttgaggaaccccagaagtaccagcctgctgattgttcatgttgccatgaattcccatgaggctgggctgcatcatatttggcggcccgtgggacacctgcatctggttttgaggaggaccagctccttgaccaccttaaaaaaaaaaaaagtcacagtttcagaaataaatatttttatcttattggtattaagatactcaagttacattactcagaaagacatccatcacccttatatccactgaccaacataaatatgctgttgacatacttcctgtgagttttctaaactacaaagatgtggctgtgggataactgcttacattcccaatgaccatataatagagaaggagaaacagtttctacattcccatatggtatcttaaagatttaacgtttcaaagatcaagaaagtttactttctttcagattaaataatgagaaaggcagcatctcactgttttaaaatgacttgtagtggccaggctcgggtggttcatgcctgtaatcccagcactttgggaggctgaggcaggcggattgcttgagcctgggaggtggaggttgaagtgagccaagatcatgccattgcactccagcctggtgacagagtgaaaccccgtctcaaaaaattaaattaaattaaattcaaaaagcactatgggctactgaaataactctgctataagaatgtgaagtgtcggccgggcgcggtggctcacgcctgtaatcccagcactttgggaggccgaggcgggtggatcacgaggtcaggagatcgagaccatcctggctaacaaggtgaaaccccgtctctactaaaaatacaaaaaattagccgggcgcggtggcaggcgcctgtagtcccagctactcgggaggctgaggcaggagaatggcgtgaacccgggaagcggagcttgcagtgagccgagattgcgccactgcagtccgcagtccagcctgggcgacagagcaagactccgtctcaaaaaaaaaaaaaaaaaaaagaatgtgaagtgtcctcttaggaaaacctcaacaatcatgagaagacatttaaaaatgcttcttggaaaactgtaataataatgactctcaaaagctatgtgtgtgatatgtggatgctgcacttcaaagaaaataacaccaaggacaggtgtcctctgccctgatgtggtaaaaagcagttaatcttgatctggaagctgagcctctggtgggagccaactgactagatgacccatctggaagctgcaaatagaggaataataaaacctcagtgaccctctcctgcgcagtccctggtgaatcatgtggcacatgttttagtcttctcagctatttctaacttagacaaaagttgctacccgccttgctgtagtgcttatttatttactgggtctttgggattttcctatagctacttgcattatctccccgtttaactgaataactttgtagttaattttgtcccttttatttttcactttttttgttgttttgtttttgagacagaatctggctctggtgcaacctcggctcattgcaacctccacctcctgggttcaagtgattttcatgcctcagcctccccagtagctgaaactagaagcgcacaacaacacacccggctaatttttgtattttcagtagagacagggtttcagcatgttggtcaggctggtctcgaactgctgacctcaggtgatccacccgccttggcctcccaaagtgctgggattacaggctgagccaccgcacttggccttatttttcacttttaaatggggactagaaaatcccctacaatgaagttatgaagccagtccatgctccaactatgaaggcagggggcaaactaccttgttcacactatccagacttctcctgaactctaaggaagattttctaaaccagccttataaactcaaagtggaactccatgaccattgtatatgcttgtatacaataaatatactgtgtatattcattcaactgacaattattcattaagtacctgatacatagaaggcactttggtgctgaggtaacatcaataaacaagacagaccaaatccctgcatccttggagcctacagtctaactggcaagagacacaactaacaaacagacaagtattttttcaggaagcagtaaaagctaacaagagaaagtagggtgagagaagagaaagtaagagataagagtagagctactttagataggataaatggggaaaccaaaacatgtacacgtgggccgggcacagtggctcaggcctgtaatcccaccactttagaaggccaaggtgggtggatcacctgaggtcaggagttcgagaccagcctggccaacatggtgacaccccatctctactaaaaattaaaaaaatagcagggcatgtaatcccagctacttgggaagctgaaacagaaaaacgcttgaacctgggaggcagaggccgcagtgagccgagactgcgccactgcactccagcttgggcacaagagcaaaaactccatctcaaaaaaaaaaaaaaacacacacaaagaaaacaaacaaaaaacatgtacatgtggaaggtaccatataaaaacacaaaatagctgtgatagggtacaagaatgagaaatgactttgtcattgttttaaaacatacttttttttttttgagatgaagtctctctctgtcgcccaggctggagtgcagtggcgtgatctcagctcactgcaacaacctctgcctcccaggttcaagtgatcctcccgcctcagcctcttaagtagctgggattacaagcgtccgccaccacacccggctagttttttgtatttttagtagagacagggttttaccacgttggtcaggatggtctcaaactcatgatctcaagtgatccacctgcctcggcctctcaaagtgctgggattacaggcgtgagccaccgcacctggcctgttttaaaacttcctataaaaaaacatgaatttgctgggtacagtggctcatgcctgtaatcccagcactttgggaggccaaggcaggtggatcatgaggtcaggagttcaaagaccagcctggccaacatggtcaaatcccgtctctactaaaaatacaaaaattagccaggcatggtggcgggcacctgtaatcccagctactcaggaggctgaggcagagaattgcttgaacctgggaggtggaggctgcagtgagccgatattgagccactgcactccagcttgagcgacggagcaagactccgtctcaaaaaacaaaacaaaataaaaaaaaaacaaacatgaattcatataactcaggaatgcagttttgcattagcagatagagaaattcaagcagtttgcactacccttctgttaccctgccagaaatagtgtgaactttttttgtaaaagtcagatttttgtctcattccttagtgatttacaattaaagttggagtcacattactaaattaactccaggagggatgggaattcagaaactagttgcactatctcagtccaaactgcttcaatgagaaagggtaagaggattagtcatgtggtccttaagcaaccagaaacatgaagtttgagcttatacattactgctttgcaaatactttttagccattcccctgtatcttatttcctctccaaaatttcttctttttgcagtacactgttggtagtaaacgtgaactgatgaagtttgaaaaatatcacactgtaaaccagaattcagacactcagcataaacaaagcttaacatgtaccacgtagagatttaaaaagttgcagttgtccaaacatgcctccatgcctttgtgtctgtggttttcatttgccagaaatgcctttttgccttttactacctgagcaagctctaactcaggggtcagcaaactatggccctctgctggtctgtaaataaacaagtgtttggaatgctaccatgcttgtttgtttatgtattgtctatggctactttctgtgctatcataacaaagttgagtagctccaacaagagactatataacctgaaaagccaagaatatttactatctgccccttcagagaaaaaaaatactgctgattcctgctctaactcaagttccatctcctcttagatgtttctgagttcctgtgacattttacctacttttgatatattgacaaaagttactgccctgaaagaataattatttatgggcttgaaattaaggggagagaccaagacttattacttatctgtatactcctgttgtctatcaagtctacgacacaatgctcaataaatgctggctaaacaaatcacagaaaacaaacctgcatgctggacattttgatttgcttgcagctgaggggctcctgaattcccaggggtggttgctgtggtcgaaggcacctgaccttgcataaagttcggattggcctgtcctgctgagaagccaggtgggaggcgtttaggcattccttaatagaaaacaatgagtaaggcagttacctagcaaatttatactcttgcttagatatggaatgaataaggaaggatgagctgcatgaagtctccactggcttagctctctctgtcacactggtaggatctttaataataaggttgggaaagatggttaaaaaaatcaacacaatctcttatatgaggcattgtcaaaatgaaaaataaatactaaaaaacttacacttagaacatgccaaggaaaagatggcaatctgctccctaaatgtgatctgaggccacgccacagcaaggtttgagggctcacttttctctgtaattaacaatggaccccaaaactttagttattttaacacaggcaccaaaggaatatgctaaattctctcatttcaaacaaattgatgtgaaatagtataaaacaaagagatgggtcctgatattaaggatagattgattatttttcctttgagggaaactgatggcaatctcctttgcagaaaatttccccccattattgcgcttgtctctttggaagagacaggagattagaaacagttcatgggagcttcaaagtgatgctgtattaaatcattatgctttcccctcataaggtttgctgtgattctgacaggtttggtaccaaaaaccatactctaatggaatctttctcaagtatcagttcctttttggaagggctaattttagaaaacttgtaataaggagaatctcagaacccacttatcatttacaacacaggccttgatgtggccagatcacctaggtgagcatatcatctgctctatgaaagcatcaagacctaaactcacttaaaaatttattacattcattcatttatttatttacttttatttttattttttgagatggagtctcgctctgttgcccaggctggagtgtggtggagcaatctcagcgcactgcaacctcctcctcccaggttcaagcaatcctccctgcctcagcctcccaagtagctgggattacaggtgtgcaccaccacacccagctaatttttgtatttttagtagagacggggtttcaccatgttggccaggctggtctcgaactcctgacctcaggttatctgcccgccttggcctcccaaagtgctgggattacaggcgtgagccactgcgcctggccatttatttttttaagggccaaattttcaatgtcctgaaaaactcttagtagacaaatatgcatttgtcctttctttaacagtgacaagtcccatttgcatgctcccactgtaattaaatcagtaatcacatttgcaggagggactacccagcttccactgatctggggtagatacccagaacagtgaaatttggagctgaaacatccttgcattttctaagaacttcttacaattcaaatattagagcctgcatgtcagcaaaattaattacaagagagtaaaaggctgatgagcaacttaacttcatcagaaaccatgggaacatgcctttgctatgttgcactaaagatgcaaggggttttttctgggtaggcaatgggtgtcttttggtggggagtatgtttatcagatgacagtattactgatactctataccttactgaaaagctccaagcacattcatgtgcactagatcaatgattaataagaataaataataaacatggagatggataagttttactgtaatcgttttacctctcacacattaagctccattgctttttcttcatacaagaggcaccttacaaaataaataaataaatctcctttaggtataactggtggaattccctctctaaggagcaggcattggcattataaaactataaaagtcaatgatttctgaacttattcccctttaatactttaaccaaacttaacaagtaccatgcttactattttattaactaggattatcaaaattgataactaaaagggccttttcttcaatgagaccctgttctttttattttgctctattgcataatcttaatttttcagcaactgagaagtttaaattgttaacaaaatgcatttttcttctggacattttaatttactagtacaagatcaagcaaaaataatttgaaaaacaaaatgaacatctctacattgaattttacctgaattttagtccagagagctagcttaaatttaaccagtaagatgctgcataacgtatcaagttaactttaagttatatcaagtgtcaccaccatatccacaaaaccaaataattatatccttactccactccctccattaactctaaaaactgaagttctactaagatctagctccagcaaatttaccaacacaaatagctacagtgttcctcacctcctaggcctggatgtaaactctgtggcccctggtttggtggttgctgctgcatcaccatgaagttaggtggcacatttccctgttgaaccataggattccgacccggagagctgacaggctgctgaaatccctggggaagtgggttattttgaggtggccttggtcccatctgctgctgagtttggttaaccgttggggaggatgcaggggatccctgctggaaggaggagggtgaggaggcaggagacttgttggtgaggtggggctgctgcaagggagttgggaccctagagggccctccctgcaaactcttcatctgaggagctgtgaactggcctgggttgctcatctgaggaaagtttgtgtgggcttgtgaggcttgctggctgccaaagggatatggagggggagggtgggaaggcgtctgtaccgtggctaaggatggtcttgcctggagttgctgttgcattgggccgggcaagggagccttcttccacccttggtttgcagtcattgtgcccagagaaccctgggctggaggaggttgaagggctccagaaggcagctggttccagcctggaggaacaggcacctgagttggggcagtaaactggggtcgaattccctgtggctgttgctgctgatgttgctgtgggggtcttgcctgcaactgttgttgctgctgttgctgttgttgctgctgctgctgctgctgctgctgttgttgttgttgctgctgctgctgcagctggggaaaattagctgggttcatttgtctgttcacagagacaggctgcattgggtgatgtgggggagctaaagatcctgagggatgactttgctgctgtatatggagcccagagaggagtggatccattgcatctgtttaaagatagtcaacaaagcaataattaacctactgcaatctagatcttagagaagtggcctttgtaattctggatatacagagcaaaatctgctggtactattcgataaaataaatgcttgtgaataccttctatgtatgaagcaacataccaagatgatgaattctgtcttaaaaagagcttggtcagtagtggacattaagagcgaagtgtaaaacatggagaccagtatttaccaaatcatattctggagaactatgttaattagcattataagaaaacaaaacaattaggtttgggaaacactgaacctaacaaacttagatgcgtttcttcactgtaggactttcagtgcctccaatatgttacttttgaatctccaggagggagggtaaagaatgatgcatttaccaaatttacttgactacagaattctatgtaatgagcatcttgcaggactacgcaggccaaggcacacttttagaaatgttggggtataattgataagaaaacaatgagaaattctgaaaagaaaataatgacatttagtttgaagaaatcaggtcagattttgtaaagaaggttgacattgtgagtttggaaattagaaattcagcatcagagataactgaattttataatgatctgtgcagaaagtttcagactcttcatcctcaaagattggaagtcattacctgactgagaagcagggcgaggagtcctgggctgcagctctggattggggcctggtgccatcatggaagatgacacatttccacccgggggtatcataacagtggcagggttgttcatccttattattcctagaaaaaagatccctaaaatagagtactggaattggcacaatttttgttttttaatgagttatttcaagaatatgaaaagatatggaaaatttgtttttttttttttgacagggtctcgctctgttgcccagtctgccaagtggcacaatcacagctcactgccatctcgacttcccgggcccaagtgatccttctgagtcagcctcccaaatagctgggaccatgggcacatgccactgggaccacaggcacacaccactgtgcccagctaatcgttctatattttatagagatggggtcgctatgttgcctaggctggtctcaaattcctgggctcaagcgatcctccagcccagccctcccaaagtgctgggactacaggcgtgagctactgcacccggcctggaagtttctacacccaccatctacctttttaaaatttaaaaaatttgctcttatgtccttcagatatatatgtagatacagcagaagccccctactccttccattccacttcctccctcttattgcaattgtggttaacagttctgttcttgtttattgaccttttctgtatctgtaggtaaactgcactttttctgtagataaacattttttgtatgcttttaatctttgtataaatggcaccttactatatgcattctttgtcagcttcctttttcacttaatgtattttttgagattcatctctcttgactgttataagggttccattgtatagaagcatatatccacccttctgctgatgaatactaaggttttatttttcctttattcttataattttgcaatgttgtgtatttgtcatgaattcttgtggatacatgagagtgtctttagactatatatttagaattgctaggttttaaagtctaagcatctttaattttactagatattggtaaactgctctcaaaagtggttataccaatttatactcaaactagcagtttgagaactcctctttctccatatctgaaaatttctgatactgctaaacttttcagaatttatcatctatgctcctaagtgagaataggtcaggcatggtagctcatgcctgtaatcccagagcttttggaggccaaggtgggaggactgcttgaggccaggagtttgagaccagcctgggcaacatagaaagaccccatctctacaaaaaataaaaaaatcagccagtgtggtggcaagcgcctggattcctagctatttaggaagctaaggcaggaggatcacttgagcccaagagtttgaggctgcagtgagctatgatcatgccactgctctccagcctaggcaacagggcaagagcctgtcttcaagaaaaaaaagtgacaacgcctatacttattctcttttcctttccttggctacagaattctctgtcatggagcatcttgcaggactaagttggccaaagcacacttttaggaatgttgaggtatgaataagagaacaatgaaaaattctaaaaagaaaatgatgacatttagcttgaagggcagattttgtgacattttgatttttggcatcgaggtgaaaataacctcaaaatgagttggaaagcatctttcttctttttctatgctctggaagaatgtgtgtatctgttctttaaatgtctgagaaaactttcctgtaaaaccatctgggcctataggtcatactaattgatttacagggaaacagatttttatttcaatttcttaaatggctatagacttttcaagttttcaatgtcttactgtcaatttttattaaattataattttgccaacactaaaatttattagcatagttaattgtggaatatattttttctattctttttaaaaaatgatatataattcatatactataatattcaccttttaaaatttgtacttttttcattctttacattgtttgtgccctctttttttccttggtggtcttagcacattcatcagttttagctgtcctttcaaagaaacatcttttgggccaggcacggtggctgacacctgtaatcccagcactttgggaggctgaggcaggtagatcacttgagatcaggggttcgagatcagcctggccaacatggtaaaacccctgtctctagtaaaaatacaaaaattagctgggcgtggtggtgggcgcctgtaatcccagctactcaggaggctgaggcaggagaatcttttggttttgctgttctgttgtttttttgattcatattttacttatctctattcttatctgtattatttccctcataacttacagctctgctcaattcttaagtcagacacttagcttgttaattttcagttggtgttctttcttaatataaatttctgaaggcttaacatttctttgaagtgttgtattggctacatctcacacatttcagtatatattattctcataattccattctaaatattgtctaatttccatcaggattgcttttttaaatcactaagtatttataatgcatttttacgtttccaaaaatatgagatattttggttatgcttttttttttttgccactgacttaacctaacagcactatggtcagagaacagaatctatgtgatattaatatttggtatttactgaaacgtgctcttggaataatccttggtcagtttgtataaattttccatttatgcttggaaatattaagaattcttgaattatgactgcatggttttgttttgttttttttctccgagatggagtctcactctgttgccgaggctggagtgcagtggcgcaatcttgactcaccacaacctctgcctcctgggttcaagtgattctcctgcctcagcctcccgagtagataggactacaggcacacgccaccatgcctggctaatttttgtatttttagtagagacggggtttcactatgttggccaggctggtcttgaactcctgaccttgtgatctgcctgtctcggcctcccaaagtgctgggattacaggcgtgagctatcgtgcccggctgactgcatggtttctatatatgtccattatataaaaagtattttgttattcaagctctcctttatccttactaattttttacaaacttggccatcaattactcacagaggtgtattaaatctcccctaaggtttgctgtttacatgcaattcttaaatgtcttgaggctaggttgttaaatacgtaagagtttagcaacttcctggtgaatttttccttttacattatatagtggccctatataccttcagtgatgctgtttattttaatgtctgctttatctggtaaaaatattattatgcttttcttggttaataatcaccttgttaatctttctatctttctaactttgaaccttctgagtccttatattttatgtgtttcctgtaacagcacataggtaaacctgagaatactattctgattaatcatttcctttttatcagtgttcataatccatttacctttattgtttactagtatattttgatttttttgtcattttatgatttctatttaccctttttttctattctgttttcctattttcctgaattttactggattaattttttttcatcatggtcatcctctttaatcctccactactagtttagaagttatatattccattcatattattttactggtatctttaaaatgtcagcagacatacctgacttaaagtttaaagacatatatgatcatcattattactaaataagtcaatgcttatttagatttaccccatgcttatcaattatttagctcaccattccttcttagatcttatttcttccatcttaggttcaattttcttcttcctgaagtacatccttgagcagttcaattagcaagggtctgttaatggtaaattctcttagtctctttgaaaagctctttatttcatactactcttgatagtatagctatgtttaaaattctaggctgtcaattatatcctcagcactttgaaaaaattattccaatgcttcctggcctccaatgctgctgttgagaaatcaagaaaagctgatagtctttcctttgtaaataatacgtcttttcttttgggttgcttttaacattctgtttttcaatgttctgtagctttacaatattgtgtctagatgtagttttatttttattttgtagtgctcaggaatactgggcttctgaatctgaggacttacgtctttcatccattctggaaaaaattttagccattctttctttgactgtcatccctcctcaatttctttatcttcttcaggaactcttttcaaacatatgttaaaccttctcattttattcttcttgtctcttgacctctttcatatttccatctctttttctctgcgcatcctgagtgatttattcaaattcaccttccaatccacctatttctaatttgctgaataagttatccactttgatgatttttaaatttctgtaagttctgttccccccatctctccttatgtttgatagtgtcttgttttcttatgattctcataattgttaatactctgacattcctattacctaaaattttagagggagggaatctaatcctaaattgtataaattcagaatataagctcatttatatcaggctttaactaggagaagtatgcaatgacttgggttgagaaaatacgcccctccacagcttcaacagttatcaccagtctagacctacctaatgttaatgacttagcctggctattaatgggtattcactaacatatcaaatgtccaaaatgcaagagggtagagaagacaattccacaacacccattctcccacctaacgtctagagccccagcgaacacagacaaatttcccattaatttccctatgccagagagtgacattttcctaatctatctttcactgaaaattctggcttcatgaagaattctgaattctaacttgcttcttcctgttgacccaaggctttatcttctatcccttcccggccattaaaacccaaatgctttggaccctgcagaatctcatttgtttactgccgtttaaatattcacctttgacatttttttttttttttttttgccctagggagttcctctactttctttccccatccctctgcttccaagcccagctacattttttttttttgttttttgagagggagtcttgctatgtcacccaggctggagtgcagtggcgcgatctcggctcactgcaagctccgcctcccaggttcatgccattctcctgcctcagcctcctgagcagctgggactacaggcgtccgccaccacacccggctaattttttgtatttttagtagagacagggtttcaccatgttagccaggatggtctccatctcctgaccttgtgatctgctcaccttggcctcccaaagtgctgggattacgggtgtcagccacagcgcccggctgcccagctacgtattaaatgttataggccggacgcggtggctcacgcctgtaattccagcactttgggaggctgagacgcgtggatcacttgaggtcaggagttcgagaccagcctggccaagatggtgaaactactaaaaatacaaaaattagccagacatggtggtgggcacctgtaatcccagctactagggagggtgaggcagagaactgcttgaacttgggaggcagagctcgcagtgagccaagatcgcgcaactgcactccagcttgggtgacagagcgagactctgtctcaaaaaaaaaaaaaagttatattttaagttttgtagttggagaggacagttaggctaatgtttatctgttgaaactggatctgtttctgaggaatcgcacctggttttttaaagatggtagttagacagttaagaaagctctcatgagggcttggtgcggtggctcacacctgtaatctcagcactttgtgaggcccaggtgggtggatcacctcagagcaggagttcaagaccagcctggccaacatggtgaaaccccatctctactaaaaatacaaaaattagccaattagctgggcatagtggcacctgcctgtaatcctagtcactcgtgaggctgaggtgagacatcgcttgaatccaggaggtacaggttgcagtgagctgagatcatgccacagtactccagcctgggtgatggagtgagactgcttcacaagaaaaaaaaaaaaagagaaagctctcatgagataagaaacaggtttttggctgggcgcgatggctcacacctgtaatcccagcactttgggaggccgagacaggtggatcacaaggtcaggagatcgagaccatcctggctaacacagtgaaccctcgtctctactaaaaatacaaaaaaaaaaattagccaggcatggtggcatgggaggctgaggcaggagaatggcgtgaacctgggaggcagagcttgcagtgagccgagccgagatcgtgccactgcattccagcctaggcgacagagcgagagtccgtctcaaaaaaaaaaaaaaaaaagaaacaggtcttcttggtccataatgagcttcctaatcccagaaaatttcaagtatatgctgactacatgttcaatagtgacactataacatgcattccagtactagatgggaatctgcacaagatccaaggttctcacctaggggaaattttgtcccctgggggacatttggtaatgtctggagacattttaagtggcacaaatgcagggaagtagtggtgctactggcatctggtgggtagaagccagggatgctactaaacatcccacaacacacaggacagcctcccacagcaaaaaattattggccccaaacatcaatagtgttgaagttgagaaacttgaattaaatgactactatagtatccccacaaatcttggaattctataaggctatgaaaaaaaacaggctatggatttagttttagttgcaaaagactcttgcttattagctaactttctgttgcccatgctaagagaagaaagcagtactaagaataattgaaaaaccaactgttgtagatacacagttctaaagttacttattattgttttagaggggatttaaggtctctttccctagaaaaatttagctgttcagtttaacctaatattaaactttgtttgcatccttcaagtctcaatagacaacagagaaaagcaatcctaaaatatgcttggcagtaaagagagatatcttgggggttaagatgttactgttactacaggtcattactaattgattattcctgaaactttatactatatacattatcacaatctgagtccttcattaaataccaatctaatctgatttcaacctaaagcttctcagtttcctaggttgataatcaactatagcactataattggctgggtacggtggctcagttcatgcctgtaatcccagcactttgggaggctgaggtgggcagatcacttgagcccaggagttcaaccagcctggtcaacatggcaaaaccctgtctctacaaaaaacaatacaaaacaaaacaaaaataagccgggtgtggtagtgcacgcctgtagtcccagctactgcagggctgagacaggaggaacacttgaccctgtctcaaaaaaaaagcactataatttacatgcacttcttagagatacttagtaaacatgcttgctatttgccagatactagcccaagagagcttttaattagggtactaataacagttaagtggcgtcttaacattttaagcctagaagggatctctagcattgtttccagaacataaagatgtttataggcaactagagtcagtacatattaagtcctttggccaggagttgagattagaacccagatttcctgatgctcatcccaggtttattcattctttcattaactatatctaacttggctaggcttttcccactctgcttctggcccatgtccttccagtagtggcaacagtgtcatctatcatttctcataaagctaccttaacaccaaatgctcagacttctgtggggaactacatctatgtacacaataccaggctggatattttacatctattttatggtattccacaacagcccaacagcacaggtcctgacatatatattttcctaagtcctaacaagaacttaggaaatgtttgctacactgctcagggctcttctaccttcaagcatgagctcaaaagatggtaggtattattatttcattttatatgtgaagaaagtattgcttggggaagtacagtaactagcttgaggtaacctgtaaatggtagtaccagaatgaaaacctagttccaattctatgatcagttcattagctacagttcagaatagcattttttttgttttgttttgagatagagtctcactctgttgcccaggctggagtgcagggtgcgatctcggctcactgcaacctccacctcccaggttcaactggttctcctgcctcagcttctcaagtagctgggattacaggcgcctgccaccacacctagctaatttttgtatttttagtagagatggggtttcaccatcttggccaggctggtctcgaacccctgacctcaggtgatccacctgcctcggcctcccaaagtgctgagactacaggcatgaccaatcgtgcccggccaagactagcatcttataaattgagctcctctatactgctgcatttctccaacagctactctggtagagtgggaggggaatgactgggtaagcaggttcttactctgcttcaaccacagcagctgtgcttttctgttttatttgaataaagggtcctgaagctgaaaaaattggaaagccactagtgcagtgaaaaaagcactgaactgggagttagaagatctgtgatactagtttatcgctccttgaccctgggcaaatcacttcctttatgtgagttccacagcttcctctgctttaaatgacagccaactcaattctaatattctgagattcaatctcagaatattgagttcaatctctgaagaagaaatttcaggattactagaaaaggaagcaatttataactctcaaattctaaatacataaaaacacatattctctcagatacatcttcagattccacataagcacacaagaactcaattcacagatattctctgcctcagagaaagtgggagttggaaagctacattctccattgtactattaaaataatgagggtagaaaatgtctcacttatttctatttccaacagcacaggtcatgtcacacaacaggaagtcaataaatgtttgctgcatggctcagtgttcatcaacctttaagcacgagaccaaaagattgcaaagatgcttcatgctgtgacctctagcctccgggaaggactcatgtctagctttcctgattcagcaaatagagatgttaagtatgccatgaacccccacctatcttgcagggctcaaatgatcaaataagccaaaaaaggaaactagtaaaatgtcatacaattgagtgggaggtcttacctggaccacttgccataggaaatcccgcctccatcctaactgaatttccagctcccatgggtccattcattctcacatcttggcttcggttctgagccaaagccaggttaatagcaccttcccctgaaaatgagtcaagtgataaaaaggaaatcattagaataaaatgcaaattttgtttatagacagctatataagtgctttagttttctgtgcttttgaagaattatggttagtttaccaccagaaaaatggtgggttcaatgtagatgggtctttcttcaacccatctaagcaggtttcatgaagcacaaggagatataaccaattcttacttgtaatagggaagcagggtgaccatgaatgatgcttagtatcaacagagatcctggaactctgaatatttattttcaaccatcttaccaattgtgtgtgtgtgtggggtgtgtgtgtgtgtaatggaagaaaatgttctcaaaaactctcaaaatcctagacttccttttggtaatttatgatcagaaggtagacactaaatataagtaggtttaaagaagaaagaacctatactggtgtggggacactaacacttgtgaacaaaataccaattccattcaataactgcaatataaacatatttccagcaggaaaaaaatcatgcaatgaagaggagataggttgctacaaatctactttctgagacacctaatgacaggaccaatacttttataggtttttgttttctgagatggggtctcactttgtcacccaggctgcagtgcagtggcacagtcatatagctcaccactaccttaaattcctgggcccaaggggtcctgctgcctcagcctcctgagttgctgggaccacaggcgcacatcactatgtccggctacgtataggattttttttttttttgagatggagtcttgctctgtcactcaggctagagtgcagtggtgtgatcttggctcactgcaaccttcatctcctgggttcaagggattctcctacctcagccttccgagtagctgggattacaggcgcccaccaccacgcccagctaatttttgcatttttagtagagacggggtttcaccacgttggccaggctggtctcgaactcctgacctcacgtgatccacccacctcggcctcccaaagtgctaggattacaggcgtgagccacggtgcccagcctgcataggatttttaattttaccttatttgagcttcacagtaccctcataggtaatgttactagaagtgttccaattaagtagactctaaacttagaggcaacttaaatcttacttggtccaatgataaaaacgtctctgaaacaagcaacagaatgtttcttgcacttaatccaaaattttgactattgttattgtaagagagcaccaccttgtggagagttaaaatatagctagtctgtggctgctgagctgaaaggctgcactcacccaagtccttctaaactgtagggttctgattcacagggtctgatggtaaaacagaaagttaatgaggtatggcagtttcctctgttctgtcactgatctaggtcagccttccttttttttttttttgagatggagtctcgctctgtcgccaggctgaagcgcagtggtgcaatctcggctcactgccatctccacctcccaggttcaagcgattctcctgcctcagcctcccgagtagctgggattacaggcacgtgccaatacaagcagctaatttttgtatttttagtagagacggggtttcaccatgtttaccaggatggtctcgatcttttgaccttgtgatccgcccaaagtgctgggattacaggcgtgagccaccatgcctggctaggtcagctttctatgtctattttaaccagggaggttcactggtcacagggaacaaacagcctaccaaaaaggaagcaatcactgggagctaccagatgctatagcttgcctctagaagtcaggcgtaaaaagagaaacagaatacaggtcatgagggtttccattaaaggaagggaactattaatatacaaaatttgttaagacattctaagtagaaagaatattgttctggaaaaggacatcagttcgtatcattccttaaaaacagttccattgcttcccactagtttagaaataaaggccaaacttctttttttttttttgaatcggagtgtctcactgttgcctgggctgcagtgcaatggcgcgatctcggatcactgtaacgtctgcctccgggttcaagcgattctcctacctcagcctcccgagtagctgggattacaggtgcttgccaccacgcccggctaatttttgtatttttagtagaaacggggtttcaccatgttggccagactggtctcgaattcctgacctcagacaatccgcctgtcttggcctcccaaagtgctgggattacaggcatgagccaccgtgccaggccaggccaaacttcttagcctatacaaggccttaaattatctacctagccaagtgttgttcaacagaaatataatatgagccacatatgcaatttaaaattttctagaagccacagtaagaaacagatgaaattatcatttattttacttaatacattcaatgtattatttcaacatgtaattaatgtaaaaattattattattttttgaaacagggtctcactctgttgctcaggctggagtgcagtggtgagatcacagttcactgcagcattgacctaactgggcttaagtgatccttcccacatcagcttcccaagtaggtgggactacaggagtatgccaacatgcctggctaatttttttattttaaattttaaattttttgtagagacagggtatcactatattgctcaggctggtctcaaactcctgtgctcaagcaatcctcctggcctcagccttccaaagtgctgggattacaggtgtgagccactcagcccagccaatgtaagaattattgagatattttacattcctttggggaataccaaatcttcaaaatgtaatatgtattttatacttacagcgcacgtcagttttaactagccacattttcagtgcctaaaagcaacatacagtctgtggctaccaatattggactgcccatatttagccctgtctacctctttaaactcatctcatgctatttttctccttcaatagcaaggattcagccccagtgtttccttttagtttcttaggcacacaaggctgcttctcaccccaaggcctttgctcatgcggtttcctctgcctagaacagttctctgcactcttcgcatagctagcttctcaattttcatgtaatcttaagtgtcacatgcccaaaaaggcctctaccaaccatcttatccaaggttaggtaacttttatcagaacatcttgttatttctgcagagcacattccatgtaatcattcactcactcgttttcttgcttgcctcccccatcactatacagggttaattacaagtctgtccttgttccttcacatctgttgttccagcataattaatagcattctctttcactttcagaaatgtcctaatttaggctaggcatggtgactcacatttgttaatcccagcactttgggaggccaaggtgggaggattgcttcagaccaggagttcaagactagcgacatggtgagaccccgtctctataaaaaattagtcaggtccgtggtggcacgcacctgtggtcctagctactcaggaggctgagatgggaggattgcttaagcccaggaggccggggctacagtgagttgtgtttgtaccactgccctccaacctaggcaacacagtgagactttgtctcaaaaaaaaaaaaaaagtgtcctaatttagatgataaattatatgactatctataatacatcatttatacataaaatagtgcctggtacgtggcagatgctcattagctatttattaaatataatggtcatcttataaccttataaagaattataagcatttttctatatgacaaattacttcctggaaaacctcacatttatcaaatctcatactgacaataacagggttagggcaaactgaaaacctgtgagactttgtaaccagagctctaataaaaacaataactggtggaggcaaaatgccagaaaaaaatgcagcagaaatgcctggttaaaggtgctgagataatgcacatgtagtggagttctgagccagcggggctgccattatggtgggcacaggaagaaatgcaacctgtcatgaactgagagccacacaaggctgggggatgcacgtcaggaaggcatacgaatatacactctcattcttaattttaatagagctgaaaagactcccacacatgcaacagctgagtgaaaagctttttcttgttgataattataattctatttctactattccagctcctcttacctaagaaaaaaaatcacatattaataaacagaatttccacactatactgctatcattcccctatttaccaactgcatatatgctaatttgtgtcaaagagaacactaccggctcccaaacttgccaattaggggtccacaaactacgtcctgtgggccaaatgcagcccactgcatgtttatttaaataaagtgttactgaaatcctgccatgtttacttgtttacatatcgcctatggctgtttttgccctacaagatggaactgagtacttgttgagttgagatcttatggcctgcaaagccaaaaatatttattcttggccctttacagaaaaagttagcagactactctttagatcaccatgaatttacagagggggcacaaaatgtcctcaaaaaagatgtttccccaattccctggccaaaacttaaaaaaggaagggtacaggaagtatttgtcaatggagaacggactgttgggagaacctgtccctcaagccttgcagcagacacgatagtggcaacattgcttcattccttcttttttgttgttgttgttttgagacaaaattttgctcttgtcgcccaggctggagtgcagtggcgtgatctcggctcaccgcaacctccacccaggaaaattttgctcgacacccaggctggagtgcagtggcatgatctcggctcaccgcaacctccacctcctgggttcaagcaattctcctgccttagcctcccgagtagctgggactataggcacgccccaccatgctcggctaatttttatatttttagtagagacggggtttcaccatgttggccaggctggtctcaaactcctcccctcaagtgatccacccaccttggcctcccaaagtgttgggattacaggtgtgacccaccgtggctggccaacattcttcttacaacttacaaaatcaacagcccagttccacaaaagcaatagctgctgccatcactttcactcctgctgaattcccaggagcatgggaacagagatcatctgggacacacatgtagcctaaaagttaaagaactctttctgtattgtgataatcattgtcatatgtgaatttcataatttcttaaaatatgttatctatttgcttccttgctagtactcatgtttaaatttatggctataatgttaagggagaaccagcattatattgttttaggaagtaggtctgcttaagaaataaaactggtacttctttctccagtgaaaaacactatcaattaaggttttgaagcctttaaataggtaacagagaccaaaaaacatgtggggttttaaagaaaccacttatgtattccttaaagtataaacagcccacatattgttattttatccaatagttgttcgacttccacttttcctaatagttcatcctacagattgctgtgaattaattgtacttttctggatccttttagatagttccacatttttcaaattaaagtggtattgcttaagccactattctctcatttatcaaatggtgaaaattatcccatttctcaatctacatataaccctttctaaataatttgtttgttggtattgcccctttgagggcacagcaacctacaatgctagactgcataaaatgtgtctcactcctataaacaaaatgacctcgactgctcaggtttcatggagcaattaggttctacgtaagcacagggccaggaggacctggactaaagtggaagggaaagctggaattgctggttgtcacctggctgtatcaacacaggaggggaagagagggttctagttcactgagcttccaaagagctcccccacacatggtaggtacttacatctctcacaggtttgtcttccttactaaagtcataagctcttccgagtttataacaataaggacaatatttatcattgtattccaaatgctaaagcttatagtctatggggataaaacaataatcaaataattgctctatgaaagtgtgagataaatgatctgagggagagaaacaaacttttgtgagagcacatagcaaaggactctgacttgccaaaggagttcagaaaatacatcctcaagatttaagctgatacttgaaggctgagcaggcatgaactaggggaagggggttggtagggaatagtatttcatttagagaagacatcaatgcaaaggacctgtggcaggaggaagagaaagctgagaagctggaacacagggggcaagggaggaaagttacacaagataaggctggatgaggaaggtagaggtgagaccatgcaaagcctgaggtcatggtaaggagtttggtcttcattctttgaataataccaagagatagcaggattttaatctaggggtgtagggttataggggtgtaggtgtgtgtgtgtgtgtgtgtgtgtctgtgcgtgcgtgcacgtgctcatcaaattctcattttgaaaaagatcattctggtaaaaatactgaaaatgaacactgcgggccggcgtgatggcctgtaatcccagcactttgggaggccgagagggtggatcacctgaggtcagaagtttgagaccagcctggccaagacggtgaaaccccatctctactaaaaatacaaaaattagctgggcatggtagtacatgcctgtaataccagctactcaggaggctgaggcaggagaatcacttgaacctgggaggtggaggttgcagtgagctgagatcatgccactacactccatcctgggactctgtctcaaaaaaaaaaaaaaaaaaaagaaaaaaaaaagaaaagaaaatgaatgctgctacaaaaggaaaggactgttgaaggcttcataatctgttagacgaataaagaaaatactaaagtttatttggtggaaggaaggaagcaaattaaattatatgttaagctgggtacagtggtataggtgtagtcccagctactcaggaggctgagatgggaggatcatctgaggccaagagtttgagtccagcctgggcaacacagaaagacactgtctctaaaaataacaacaataacaaagaaaaccacacaactaaataaataaataagacaaatcaattcctggtcaggatgccaataaaatcaaagtctgaaagactgatggtcaaaattagccaaaggaatggagtccaaggctacagatgctaaagaccatcaggacccagcaataacctcagtcagtccctcttcatcctaaggtgctgcaaagcaaagtacaagttacatgagttgcttggcattctgaaacacaagagcagaggaacagacaaagcagcacagaaaatcatgctatattctactgttgtaatgattctggtctagatgggcacatggcaaagtaaaagaccttcaatctgaacggagagaatccctaaatcccgaagctgctggttgttgctctgagcaaggatccgtagccgctccgctgcttcccgggggatgttgaatgtcacacgcacgctgttccagggctccaccttctgtacttttagcttgctggactcttgattgtgaaagaaaaagaattatattaataatcttttagccaccagaggagatggaattaaaaaacaaaccaaaagagcaaaagaataaggtggagcaccagcttggaatagctaacagagcatatgctttggagctacagactcaaatctaatcctagctttgccacttagcacctgggtgaccatgaacgagctatttaacctttctgaaacttatctttttcttttctaaaactatgaaaaaactacttcatatgatttttgggtacaaattagataatatatgcaaaaaatctagcatagtacctggcacaccacaggcaatgaacggaaagccgtaagatggagaaaggaccataagaaagaagagagaggttaagtttaaattaatagaataggctcatgcctataatcccagcacttcgggaggccgaggcaggtggatcacgaggtcaggagttcaagaatagcccagccaacataatgaaaccccgtctctactaaaaatataaaaatttgctgggcatggtggcatgcacctgtagtcccagctactcgggaggctgaggcaggagaattgcttgaacccgggaggcagaggttgtggtgagccaagactgcgccactgcactccagcctgggcaacaaagtgagactccgtctcaaaaaaaaaaaaaaaaaaaaaaggtaaaggacagttctccagaaaagatacacaaatggccaataagcacatgaaaaaatgcttgacataactaatcattagagaaatgcaaatcataatgataagataccacctcaccaccattaccatggctactatcaaaaccacagaaaataaacaatggtgaagatacggagaaatagaacctgcggggcacggtggctcacacctataatcccaataatcccagcactttgggaggctgaggctggtggatcacttgaggacaggagttcgagatcagcctggccaacatggcaaaaccccgtctctactaaaaatacaaaaattagccaggcatggtggtgcacacctgtagtcccagctactcaggaggctgaggccagagaatcgcttgaacccaggaggcggaggttgctgtgagcccagaatgcactactgcactccagcctgggtgacagaacaagactccgtctcaaaaaaaaaaaagaaactggaacccttgcgcactgtcagtgggaatgtaaaaggatacaagctgctgcggaaaacgacagtttctcaaaaaaaattaaaaatagaattaccacatgatgcagcaattctacctcggagtacacactcaaatgaactgaaagcagagtctcaaagagatatttgtacaccatattcatagcagcattacccacaatagctaagatatggaagcaacccaatgtctactgacagatgaatgaatcagtaaaatatggtatatacatacaatggaatattattatattattatttgagacggaatcttgctctgtcaccaggctggagtgcaatggcatgatcttggctcactgcaacctccgcctcccaggttcgagcaattctcctgcctcagcatcctgagctgggactacaggtgcatgccaccacgcccagctaatttttgtatttttagtagacacagggtttcaccatgttggccaggatggtcttgatctcctgacctcatgatcgcccgcctcggcctcccgaagtgctgggattacaggcgtgagccactgcgcccagccacaatggaatattattaagccttaaaaaggaaggatatcctgccacatgaatgggctttgagcatcttacgctaagcgaaataagccagtcacaaaaaggcaaaattccacttatatcaaggaagtagagtagtccaaaatcatagaaacagatagtagaatggtggtttccagggactagcagcaaggaggaaatggtgagttgttattcaatggttagagacgttcaatttttttttttttttgagacggagtctcaatctgtcgccaggctggagtgcagtggcgcaatcttggctcgctgcaacctctgcctcccggcttcaagcaattctcctgcctcagcctcccgagtagctgggactatagacacctgccaccatgcccggctaatttttgtatttttagtagagacggggtttcaccatgttggccaggatggtcttgatctcttgaccttgtgatccacctgcctcggcctcccaaagtgctgggattgcaggcatgagccaccacacccagccagagatgtttaattttacaagatgaaaagagttacatcctggctaacacggtgaaaccccatctctactaaaaaatacaaaaaattagcctggtgtggtggcgggcgcctgtagtcccagctacttgggaggctgaagcaggagaatggcgtgaacccgggagacggagcttgcagagagccgagatcgcaccactgcactccagcctgggtgacagagcaagactccgtttcaaaaaaaaaaaaaaaaaaaaaaaaaagacaagacaagacttagggcgacacatggtggtgattgttgcacaacattatgagtacatttaatttccactaaactgtatacttaataatggttaacatggtaaattttatgttacatgtattatacaataaaaaatactttttaaaaaagttaagtaattgaggaggtattattaattgtagttacattttacagattggaaagcaaatcccaggcacagttagctgataaaaaagttatttggctgcgtgcagtggcgcatgtccgtaatcccagcactttgggaggccgaggcgggcagatcacttgagctcaggagtttgagatcaccctgggcaacatagtgagacctcatctctacaaaaaataaacagaaaattagctgggtgcagtggcgtgcgcctgtagtcccagctacttgggaagctgaggtgggagaattgcttgagcctgggagatcaaggctgcagtgagctgagatcatgccactgcattccagcctgggtgatggggtgagacactgcctcaaaaaataaataaaaaataaaaaaagttattcaacaacctcaggcaaaacaattttctcttttgttattaactcagctaaacttaaacttctgtatccttcattcagttatacattctaatattaagataatggtcattcaacacctgtgaaaagaaggaaaaaagagataatggtcatagaggaatatgctttctcaaaatgagaaatatctaaggatagaggaaagtgcctacatgttgcctaaagccccttccagctcttaaaccattgtacattgaatgttaacttttccagacatggagttcacttgttctaatgtggaaaaaaaaacagggaaaacttgctaaaaggaatgagataacacaatcataggaatttagaaaagattagacaatatttagtccaagaccattttacaggagaggaaaccaaggcccagaaaggctaagtgatttgctcagaagcctgtggctaaccagtagcatcagagatgacattaaaacccagctctgattctcagggcaatttcctttccattacatgtaggcctccaaacagcaaaaggcaggaagtttggggatcctggttccaccaatcatagacactgcaggacttcttcccactctgaagtatgttggaatcttgtacatattctacacaaacatcaaatttgcttatggtattaacacttgtaatatgcttgcagaaaaatccatattcataacagttatatcttatcaaaatctttttaaacttccatatttgagagatttgacttaaaatattttttggaccaagaatataatctgatagcaccataaatctagagttggttattttttatttatttttatttttttgagacagagtctcgctctgtcactcaggctggagtgcagtggcatgatctcggctcactgcaacctctacctcccaggttcaagcaatgcctcagccacccgagtagctgggattacaggcacctgccagcacgcctgactaatttttgtatttttagtagacaaggtttcaccatgttggccgggcttgtctcaaactcctggcctcaagtgatccgcccacctcgacctcccaaagtgctgggattacaggcatgagccactgcgcccacctttatttattatttattttttttagacagggtctcactctgtcacacaggctggagtgcaggggcactattagagctcactgcagctttgacctccctgggctcaagtgatcctcccacctcagcctctcgagtagctgggactacaggtgcatgccaacatacccaactaatttttgtattttctgtagagatgaggtctctctatattgtccaggttggtcttgaactcctgggttcaagtgatccacccaactcaatctcccaaagtgctgggattacaggcatgaactactgtgcctggcctaggtttggtaatttatttgaaagccataaataaattgaattagcaatatgtaaacaacagaaaaatgtggtaattaatgaagagcaatgaacaatttcaggcccagcaagacctttataatatataactatgattatggttacaatgatgttgataactacatgaaaaattcttaattgtatgctaaataacgcataactatggagaaccttgtacaacacagtgaaaagcagttgaaaaaacaacagcttccgtccagataacaaatctcaaaagataaaacccccaagccttaaaagaaagctaattagctcttgatcaatttaggatttgtgataaaaggaataaatctaggcttttcactatgtccgaagggattagataattgtgctaactagaatagagaacatctaaatcaaggttcaaaaccacaaatgcccgtaagatatggacaggtaatctaaatgtgtgaagaagccagatgggaactgtggtgaagtggggctgctctcagaagcagctgctacttcgtaccatctgggagagagggagaactcaatgttatcagatcttcctatttttaaagacaaatgtaaaaatccggattttcatgcaatataactcaatttttaaagcactggcaatgaaactcaaacactgaaaacaaactaaatctcaaacactaacgtgggccaaataacaaatgcctgcagactggatccagcaagctgttagctagtgacttctgacataaaagttaaaggaataaatttaaagtatattataagcagattcatggaataataagttttctaagctttaagggtccttaaagattcagtttaaccttttcaatttacaggtaaggaaaatgaaaaccagagagttaaaaacaaataaatttgggtcttgagaattacttttatccactagagaagattattcaacaattaccataataagcaacactttatgttcagttcttctatgtacttaaaaagaaagaaaacatgtatatttttaaaatcctaaaattccacctctgtgcttaaattcagccttttgacccaatttaacaagcttgttttgtaaaactcaagataaccatggaagggcaaacatttcaaaaacagtaacaggaagaaaaaataattaaagcaaattacccatgtgtaacaaattgggcacgtttttcaatattgcatctaatttccatttgaagtctttatcatctatatttcctttgaaggccacaaaaattgtggaatcctccaaaatactatcactttttgtgtcatcatcttctagtccagagtcaaaatccatctctgagtcttccattgttgatgaacacaaggaagtatagatgtcttctaagtttggaaggtcatccaaaaccatggtgaatattattccagaagcatatgccaagaggacaataagaaaacttctgaaaagagaagatgcaaaagagcattacaatgcatagttatgcattcaacaatgtataattcatagttctatgaaaattataatttatttaataagaaaatactataaaaattaagaaattacagagaagataagctattttaattatgacattctaaaacaattagttcttacagttaccaaaaataaaaatacactagtcttaaatttaacattctttttattatgttatatgctacttttttataagctagaatgtcaggagaagggaagaaaggatcacaagaaaataaaacaagtacatactttttgagaattataggcctttggttgaccccacagagcaaggggctccccaagactccccctacttctgtcttgacaaaagcttaaaaggagccaaggtttctaaagccttcttctttctccaaactacaaagcacaaccagacctgactaatagcaactggatgattacctaaaattctgaagtctttcatgaaccattttaaacaactattaaagggttattaacagtggaatggctgaaaataatgattctgaaataaacacttaaaaattcttatatgaaagggctgggcgcagtggctcacacctgtaatcccagcactttgggaggtcaaggtgggcagatcacttgaggtcaggagtttgagaccagcctggccaacataatgaaaccctgccactactaaaacacaaaaataagctggacatggtggtgtatgcctgtaatcccagctactagggaggctgaggcaggagaattgcttgaatccaggagggtggaggttgaagggagccgaggttgcgtcactgcactccagcctgggcaacagagcaagactccgtctcaaaaaaaaaagggggttgatatggacaggtaatctttatggaggtaaagaactgtgttccggacagaattaaattgcttcctaaattttagatataaagaagttacattttctgctatcttcaggtatgctgcttaccaaagagtacatgtattaaagatcacacagtgtggccatttcctctgttagtttggggattgaagatcacatacttaacccaaaagtaaatgaatgaacattaattttcagcatttgcggtaagcaaaaatggcatggaaacctaagaacctcccacaaatgttctaataaaataattccttataattttaactataatacaacattgattgattgattgattgagacagagtctcacttttttgcccaggctgcactgcggtggcacaattcggctcactgcaacctccacctcccaggttcaagcaattctcctgcctcagcctcccgagtagctgggactacaggcaagcaccatcatgcctggctaatcttttgtagttttagtagagatggggttttgccatgttgcccaggctggtcttgaacttctgagctcaagcaagccattcaccttggcctcccaaagtgctagaattacaggcgtgagccaccttttatttatttatggcacttatttatttatggcacatgtccagcctttatttatggcacttatttatattattaaagtattacgaattattactttatacttataactataattacaagtttcttaaaaaaaagatggataagaaaattaatcccctaaaaagcaactatattaggttggtaggatcattgataaattttattttcctattttccaaatatgctgcaaatcattaggaaatacaaaactgctgtaatatggttatattccttgcataaatgaaaaaaagtaactcaaacaccgtttaacttttttttttttaatttatttttttgagacacggtctttctctgttgctggaatgtagtggcaaaaacatggctcactgcagcctcaacctcctgggctcaagtgatcctctcgcctcagcttcccaagcagctggggttacaggcgtgtaccaccgtgcccagctaatttttaaaattttttgcagagattggatcttgccatattgcccaggctggtctcaaactcttaggctcaggtgatcctcccaccttggcctcccaaagtgctgggattacaggcatgagctaccatgtccaaccaatttttcttttttaaatagtgaggctggtggatggcttgagggcagcgatttaagaccagcctgggcaacactgtgagaccttgtctctacaaaaaataaaaaaattaactgggtgtggtggtgcatgcctatagccccagctactcaggaggctgaggcgggaggatccctcaaacccaggagttcgaggcagcagtgagctacgatagtgccactgcattccagtatgggtgatagcaacatttttgtctctaaaaataaaaataaaataggctgggcgcggtggctcatgtctgtaatcccagcactttaggcggctgaggtgggcagatcacctgaggtcaggatttcgagaccagcctggtcaacatggtgaaaccccgtctttactgaaaatagaaaaattagctgggcatggtagcaggcgcctataatcccagctacttgggaggctgaggcaggagaatcacttgaaccctggaggcggaggctgcagtgagctgagatcgcaccactgcactccagcctaggggacaagagcaagacttcatctcaaaaataaataaataaaataaaataaaaaaattactactgactaaacttcaacagcaaaggctttccaaaaaccaacctaagcaatccttgggggaaaaattcttctgttataagtaaatatggcaaaaatacttccaaatttgagcagagcaccttgtgttctggcaattatatccttttctagtgctatgactgttacaatgaaactgatttgggtggttaagaaacaacagcagggtcagtggctcatacctgtattcctagcactttgggaggcagaggcaggagtgctgtttgagcccaggagttccagaccaggctaggtaacagcgagaccatgtctcaatttttttaaaaattaaaaaaaaaaaaaaaaagatacaacagcagtcagaaaatctcaaattaataccactgcccttatttgattgccatctgcattttacagatttttaataaactttagaggtaattaaacaaaactaatgaagatttttagggcttaaaagttgctgcttagcaggaaaaatgatgactgcctaaaaaactatgactatttagcagctattccaaagttggaacaactgcaagaaaacatcttaaaatctaagaaacattttccaaaagaatctttaaccagaaaggagactaactaaaaagcctggactttgatagtctccctaaacaggtcgttggtcatgacatgaggactatgtatctagatctggaaaatcttctactggcagatacaggaattgtcagtttaacaatactatgggcattacacagtacttaaaaaaaaaaaaaaaaacagagagaaattgaaagtcagtctatgaaaaattgctggctttccctccagaaaaaataatttttaaagaaacttctttggttggtaggctatttattactgcctcaatttcagaacttgttaattggtatactcagagatttaattttttcctggttcagtcttcctggttcagctgagagtgtatgtgtccaggaatttatccatttcttctagattttctagtttatgtacatagaggtgtttatagtattctctgatggttgtttgtatttctgtggggtcagtggtgatagcccccttatcatttctgattgtgcttatttaattcttttttcttctttattagacctgctagcgatctattatagctagtgatctatcaatttttttcaaaaaaccagcttctggattcactgattttttgaagggtttttcacatctctatctccttcagttcagctctattcttggttatttcttgatcttttgctagctttggggtttatttgctcttcattttccagttcttttagttgagatgttaggttgttaacttgagatctctctagctttttgatgtgggcatttagtgctataaatttcccacttaacactgtttaacactgtcccagagattctggtatgttgtctctgttctcattagtttcaaagaacttcttcatttctgccttaatttcattatttacccaaaagtcattcacgagcaggttgttcaatttccatatagttgtgtggttatgagtgaacttcttaatcttgagttctaatttgattgtgctatgatctgagagactgttatgactaaataggattccctatttaataaatggtgctgaaagaactggctagccatatgcagaaaattgaaactggaccccttccttacgccatccttacaaaaattaactcaaaatggattaaagacttaaatgtaaaacccaaaactaaaaaacttcagaagaaaatctaggcaataccattcaggacatgggcatgggcaaagatttcatgataaaaacgccaaaagcaactgcaacaaaaaaattgaaagtgggatctaattaaaataaagagcttctgcacagcaaaagaaactatcatcggagtgaacagacaacctacagaatgggacaaaatttttgcaatctacccatctgacaaaggtctaatatccagggcccacaagaaacttaaacaaatttatgaaaaaaaaaaaacaaccccattaaaaagtgcgctttcaggtctcccctgcctccaatcttattgtcctccaatctgtctccagacagcagccacagggatctttctaaaacacaaaataggccaggtgtggtggttcaggcctgtaatcccagcactttgggaggctgaggttggaggatcatttgagcccaggattttgagaccactcctgccaacacagtaagaccccgactctacaaaaaaaatttaaaaattaaccaggtgtggtgatgcacacctgtagtcccagctacatgggaggctagggtggcagaactgcttgagcctgggaagtcaaggctacagtgagctatgattgtgccactacactccagcctgggtaagagagcaagttcccgctcttaaaaaaaaaaaaaaaattaaaagagatcaattttggagatggcttaataggcctaggaaacaagttattgaggaaaaacctcaaaacaaactttgccatttacaaattaacctgtatttgatgcaggaccggcaagcctccaaagtggggcttagccttcaagcgttcttggcttcgcccaggagaacttaagggtgagccagggtagggtagaagaaaacagctctattgaagctgcagtgttacaactctgtgactgctcctgcagagcaggactaccccataggcagtgtgctgagactggcagctcagagcagttttgcaattatatttatacctaattttttttttttttttggagatgaagtcttgctctgtcacctaggctggagtgcagtggtgtgatctcagctcacagcaaccgccgccttccaggttcaagcaattttcctgcctcagcttcccagttagctgagactacaggcagatgccaccacgcttgactaattttttgtattttagtagagatggagtttcaccgtgttgcccaggctggtctcgaactcctgagctcaagcaatccgcccaccttggcctcctactgtacctggccagcagttatatttatatctacttttatgtatttcatttattttaatttttttgagatggagtctagctctgtctcgcccaggctggagtgcagtgacacattttagtagagatggggtttcaccgtgttgcccaggctggtcttgaactcctgacctcaggtgatccacccgcctcggcctcccaaagtgttgggattacaggcgtgagccatcgtgcctggcctatacctacttttaagcatgtagattaacaggtggtttatgcagaaattgctagcagaagtatggtaacttttgggtagtcaggtcattgccacggagaggggtggtaagtcttgggtgttgtcatggtaatggtaaactgacatggcacactggtggatgtgtcttatggaaagctgctcctgccccatccctgttttagcagtcctcaatttggtctggtgttcaagccctgcctctggagtcaatttccacctcctacctcatatttaggcttaactgaaggacatataggttttaaagttgaagattaagtaaacagcctgtaattccagcactttgagaggccgaagcaggcggatcacctgaggtcaggagttcaagaccagcctgaccaacatggagaaaccccgtctctactaaaaatacaaaattagccgggcatggtggcacatgcctgtaatcccagctactgggaggctaaggcaggagaatcacttgaacctgggaggccgaggttgcggtgaacatagcgccattgcattccagcctgggtaacaagagtgaaactccgtctcaaaaataaataaataaataaataaatctctttagcaggttgatgttttgccttggtgtgccaatgaattgctagattatgtgtcaagttcaaagcatctgaaaatttcaagttacaacttacaaaaaagtatatactataggttacgtggaagcctgatattaggaaatcaacaattcatctaagtgctgtatgaagcagcatctagaaagctttattcaacaaactttgagggaactatggtagtagtaatgagaaaagttaagtaaatagcagtgatcaaatgcaatttcttcaagtttcaatctatggaagtcaaccaatgacaacaatggtatctttcttactcatctaacaaataatttacctttagaaaaatataaggataaaaaggttattgtaaagccctacaaggaggaaatccaacagtttttctgattactgaggcatcaaatgcctgacattgtatttacaggtatcttgatattgtgtcacaggtttatcagcagttccccaagttcctactccaactttgcataaaggcttactatggctaggtgtgctggttcacacctgtaatcccagcactttgggaagccgaggtgggcagacggcttgagctcaggcttttgagaccagcctggggaacatggtgaaaccccatttctacagaaaatacaaatattagctgggcctggtggtgtgtgcctgtagtcccagcaactcatgaggctgaggtgaaacaatcccttgagcctgaggggagtgaggggaagggtggaggttgtggtgagctgaaattgtgctactgcactattgctgctctgagcaacagagtgagactctgtctcaaaaaaattaaaaatgactataaatactcggtaaatgtcaaagtgttatagtcacacacagcataacaataaaataatattcttcacggcaattattcctgccttaaatggaagaatattcactgaaaaacattaatgtaaaaacaaaatttaagaaaggccgggcgggcacagtggctcacacctgtaatcccagtactttcggaggccaaggcgggtggatcacttgaggtcaggagttcgagaccagcctggccaacgtggcaaatcccatttctactattaaaaaaaaaaaaaaaaattaagaataactctaaattacacatatattcacagcaacattattcacaatagccaaaaactcaaatgtccattaacaggtgaatggataaacaaactgtggtagatacatatagatagaatattatttagatataataaggaatgaagtgctgatacatgctacaacggagataaacctcaaaaactatatgctaagtaacagaagccagacataaaaggtcatatattgcataactccatttatttattttattatttatttatttatttaattattttgagatggagtctcgctgtgttgcccaggctggaatgcagtggtgtgacctcggctcactgtaagctccgcctcccaggttcatgccattctcctgcctcaacctcccgagcagctgagaccacaggcacccaccactacgcccagctaatttttttgcatttttagtaaagacagggtttcaccgtgttagccaggatggtctcgatctcctgacctcgtgatgtacccgcctcggcctcccaaagtgctgggaccacaggcgtgagccaccacgcctggcctattattatttttgagacggagtctggctctgtcacccaggcaggagtgcagtggcgtgatcttggctcactgcaacctctgcctcccaggttcaagtgattctcctgcctcagccttccaagtagctgggattacaggcacgcaccaccatgcctggctaattttgtttgtttttaggagagatgaggtttcaccatattggccaggctagtctcaaactcctgacctcaagtgatacacccgcctcagcctcccaaagtgttgggatatcagccgtgagccaccgcacccggtctaatttgtatgaaatatctagaataagtaaattcacagagacagacagacggattagtggttgtgagcgggaggtataggggatggggaatgggacatcttaatggttatgaagtttcattttggagtgacagacatgttttggaactagatagaagtggtggttgtagtacaatgtgaatctactaaatgccactgaactgttcactttaaaatggctaatttatgttacgtgcatttcaacctgatgcatttttaacaactcagaactcagcccactccatacagaaagtagcacatttaatttcttctcgaaacatgcttttagaaaagtattttccctaggtaatttttcttgtatctttttactgctttaaaatgtcaattgtgcacccatcatgagtattctctaagtagggagcagcagtctttgtcagtcagataaagatttacatagaagagtagctgcttgtggcaacagctctacagtgcttgcttccttctttgttcctaatagcactccttctttcctcctaggatctgggagtgaaggactggtcgtacctcaatgcactgctcaccctggcagaaatgacggccttctgctcctggcacaaagctcttaagtctcagaatgaaagaaaaaaaaactttctagatacaaaaactacttctcagtaacttgcaaatgtcagtgtctttaaggaaaaccagcaataaactcttaaattacatttaatgtaaacaatgactgcttgccagagtagtcacttcaacaaactgagataaaaatctaaggatgttagggcaccaaggcacatacccaaacccctgtcataatactgtacatgaaggaaattctcaaaagaagaaggagagagggcagggagatgatgcaaaaatgttctaatattagcaacttctcatgggcttatgaagcacttctgaagagtcccctgtgccaatttaaacccattatgacatacctcccagtgggggactgccaggatctgttattggagtgctatacaaaagctaggagggagggaaatagaaatttcaagataaaaacagtctaattttttctgggctttagctcacctcagatctaaatacagcatcaaactagagttatgttgagtttgcaactttcaacatatatttctatttttaatcaaaggtatttatttgaagtacaatatcctattatcattttaatcaacataaattctaaaaataagtattgtttactggtctttcattgtcttctacagtgaaacctaagattatcatttataaaaaagatgagaaactacatagtttgtagtaaaaaccccatttaaaaacagaagaatagcatctgtattttattaaatgtctccaagaataataaatgcattctacacagtttttccaaaagagagacagtatcagaaaaaaaaaaaaaagaataagcattaagttggctttattaactctctcgcataaggtttcactcaccaaaatctctttcttaatttttatcatttatccaggtcatcttctaagtccaaagaagctggcatttttagggcttggatttcaaggtagcagcccagcagccaaatcaaaattctaaaaacaaacaacaacaacaacaacaaaaagagagagagagataaaataaaaccacagtattatatagaaattaaagatttctttaatttcataacctatcttttcaacaaaagtcaatgtaaatatcacaagttatcaagtcagcattggcatctttagagaatgttaaaacagggttttcattaagtctacaaagattatcttttctgatttttttttttttttttttttgagacagggtctcactctgtcacccaggctggagtgcagtaacagatcatagctcactgcagctcaacctcctaggctcaagcaatcctcccacctcaggctcccaagtagctgggaccacaggcgcatgccaccacatctggataatttttttgtattttttttggtagagatggggtttcaccatgttgcccaggctagtcttgaacttctgggctcaagcgatccacccgcctgagcctcccaaagtgctgagattacaagcatgagccactgcccccagccttttttgagattttaggccactcatcagcaagcattcaaagattgtagaagcaaaactcacagacttatacaagcatcacttaagaatcataaaactgtcactttaagccttagagccctctctataccttcattcttaattctgtccagattaattaacatcaggtcacactatctgcatatgcttagagcccaaaacaaaatattttgtacacatacaaaatacaagacccgcttttctaacaggatttcaaatttagctttttaaacttgacaaagttttaggtgtaagtttttttcctattttatccataatatctatacattatatttttcattaaattttcagtttaagtcttgaaatatttactgtagatataaaacttatgcatggaacttgcatggtggtgcatgccggtggtcccagctattcaggtgactaaagcaggaggatcacttgaggtcaagagtttgaggttacagtgagctatgatcatgccactgcaatccagtctgggcaagaaagctagatcctgtctctaaaaaaaataataataaagccataagagaaaagattgataagttcaaatgcaaaaaaaaatcaattctgcaaagcaaaaaacattgtaagtcaaaaaaacaacaaactaagaaaaaaatacttgcaatcatatcagtgataaaagaacaaatctccctatatagaatgatatagaaaaaaatatgcataggtatgtgtatgtatatgtgcttatacaggcacataaaataaaaagatcaatttggacaaatgtataaaaatggacacagaatatgatcagaaaattcacagaaaaagaaatacaaacgaacattcaacatatgaaaagatgtttaccctcacacaaaagaagcaaaaaacaatttttcactcatcagattagcaaaactccaaaaatttgataatttactgttcccagcaaggttatggtgaaacaggcactcttattcattgctggcggtagtgcaaattggtacaccagcaattaagtaatgtctttcaaaatcacaattacaagctgggtgtgctggcacacacctgtaatcctgggtacttgagaggctaagacaggaggactacttgaggccaggagttcaaggctgtggtgagctataatagcatctgtaaatagccactgcactcaagtctgggcaacacagtgaaacttcatctcttaaaaaaaattacaattgcataaactattaacctagcaattccacttctggatagcaatcctacagatacacttatcatcatataagatgacgtatgtatagtgttatgcactacagcactgcttgtaatagaaaagttaggaaattacccagatgtccatcaatgggactgatttaaattatagaacatccttaaaaatgaaatgcaaaaaaaaagaaacacagcaagaaggaaaatgctgtctgtgtactgacacaaaaagatctccaagatatatttttgagagaaaaaaaacagagtaaaccattgagtaccttgtgctactttttttggggaaaggggagaaaaaatattttatacatgctagtgctaaaatactctagaaagaaatataagaccaataaaaatggttatcttacaaggtgaatttaaaaaatgatgttataccagagggaaggaagcactcacactaatgaggagtgtgttacaagaacacaggagccagttttaagggttttccactgggcaaatttgagacaatttgagtaccaaaagagaataattactaaaattgatatcatgaataagaatccatgaatctccagcaataactcagagagtgaaaaactttaaaaaaaaacacttcttcccatcattggaggtaactatgacattaatgacttattctgaagattgataattaaagagaaagaaataagcaatttacagcctttttagaagggttcatcctcggtagagcggcaaagctctcttacagaagactaccagttaataaatgtagaagcaaagaaagaatttcaaaatcaccattttgcaaccccaaatgaaataaatgattcaggcaaggacgatcacaggttgctaaaaatcatttttgcatgatcgaaaattgttggaaaacaggttaccacagtgccaaaggatcattccagagattacttccgaattgcaaaggggaaaaactgagtaccattataatgggaagatgtgacagtcaccagcttaacctagtgatcaaactcagcaacaatcagagtgagactcttcatttatgcctcttgatgtgatgtaactttaaatacacagactaagttatgatgtattattaccaaaagtgcctaacctaggtctaaacaagtcttcaacgtaatttctccttcacaggaattcaagagatagagcaacaagaaaaatcacaagaaaacgtaatctgacagaactagaatatggaacttgctacaataaaactggtctggtctcttcaaaaagccaaaatcttgggggaaaaaataggggaaggatagagttctagattaaaagagactgaaagtcacaacaaccaactgcaatgcagaaatgttactcagatctggtttgaagaaaacagtttgaaataattttttaggcagctgggggaaactgaatgtgaactgagtagaaggtattagggcattatttttaattttcttgggtgtggtaatgttatttgtaattaggtagagaatgttctttattcttagaagatgcatgctaaagcacagggttataaagtgtcattatgtctgcagcttgttttcaaattattcaacaaaggtagatattacaaatatggcaaaatgttaacacttgtttaaactacatggtcttcatggtattattgtttcaacttttctatatgtttgaatttttttttttttttttttttttttgagacagagtcttgctctgtcacctaggctagagtgcggtggcatgatcacagctcacagcagcttcaaactcctgggctcaagtaacctcccacctcagccccagagtagctgggactacaggtgcacaaccaccatgcccagctaattttttgattatttgtagagatagggtctccctatgttgcccaggcttatctcaaactcctaggctcaagcaatcctcctgcctcggcctcccaaagtgctgggattataggtgtgagccaccgcacccgacctgaaatatttcatattaaaaaagttagaaccaggtatagcggctcatgcttgtaatcccatcactctgggggtgctgaggagggcagattgcttgagcccaggagtttgagatcagcctgggcaacatggtgaaatcctgcctctacaaaaaaatacaaaaaattagctaggtgtggtagtgtgtgcctgtagtcccagctactcagaaggctgaggtgagagaatcacttgagcccgggaggcagagattacagcgagctgtgattgtgccactgagctccagcctgagcctataagttcgagaccagcccaggcaacacagtgagatattgtttcaactaaaaaaaataaataaaaaattgactgggttttgtagctactcaggagactgaattgggaggatcacttgagctgaggagactgaggctgcagtgtgccatgatcagcattccagcatgccggaattccactgctttccagcctgggcaaaaaagctagcatcccgtctcaaattaaaaaaaaaaaaggttggaagaaaaagaccataaaggtccatgggagctgagggtgagatcgagacttctcactatgtatctttttgaataatgtttttcttttgaaccatgtgaatatattacctattgaaaacaaaagttagctataaataaaacctcttaaacgcttagtatcaatatttctactcttaccccatctcagatatgcaacaacaaaaatgtctcctgctttttatctccttttttgaagggggctcctctggctacatttccccacgagtcatttgactcatgataagaacctggaccatcagccagcatggccaaggagtaattgtgccacctcttcccaaagcccaggcagcacagctcacagctccgggaaagactccttccctctgcttgaggagaggagagggaagagtaaaagaggattttgtcttgcaacttggataccagctcagccacagtaggagagggcagagtcctgaagtccccattctagaccctagctcctggatgacatttctagacataccctgggccagaagggaacccactgccttgaaaggaaggactcagccctggcagcattcatcacctgctgattaaagacccatgaggccccaaataatcagcactgatagccaggtggtatttgctgtggggccatgagtgagactgagacatgctgtcttcaagcatgacccagcacattcccagctgtggtggctacagggagagactccttctgcttgagaaaagaaagaggagtaaaggggccgggtatggtggttcatgcctataatcccagcactttgggaggccgaggtgggtagatcacctaaggtcaggagtcccagaccagcctggccaacatggtaaaaccccatctctactaaaaatgcaaaaattagctgggcgtggtggtgcatgcctgtagtcccagccactcgggaggctgagacagaagaactgcttgaacctgaacctgggaggcggcagctgcagtgagccaagatcacaccattgtactccagcctgggagacagagcttccagcttaggtaccagagacactaagctacaagacaaagttccctttactatttgggctatgtagagcactaagcaggctctcggggtccccaattccaggccttggttcttggatggcattttcattcttttttcttttgtttcctctgactgcatattttcaaagaggctctgggcctgccctgggccagacaagagcccactgtcctgaagggagagtcctaggcctggcagcattcatcacaacctaactcaagagccttcgggccttgagtgaacactggcagtagccaggtggtgcttgccacaggtctggggtggtggcggccgtagggaaagatgcctctgtttgcagaaagaggacgaaaaaacgggaaggactttgtcttgttacttgggtgccagctcagctgcagcagaacaaagcactagatagattcctaaggtttctgacttcaggccctggcttccgaacatctctggacccacccagggctggagagaacttgctgccctgaagggaaggacacagcatggctggctttgccacttgctgactgtaaagccctagggccttgagtgaagaacacaggtgatagccaggtggtagttactacaggccttgggcgagagacccagtgctgtgctggctttaggtctgacccagtgtagtttcagtggtggggtggccacaggggtgcttgtgtaacctctcccctagctccaggtagctcagcatagacggacaaattccagttgtttgggagagagtaagaggagagaacaagagtctctccctggtaatccagagaattattctggattttacctaaaaccaccaaggtggtacctctatgagtctgcaagagccacagttttactacacttggggtgccacctaatgtagatacaaatgcagtgacaagagacctggatcacaacactcaagtccctttgaatactcggaaagccttcgcaagaaagatgggtaaaaacaagcccagactgtaaagactataataaatacctaactctccaatgcctagacaccaacaaacatccacaaacatcaaggtaatccaagaaaacatgacctcaccaaatgaactaaatatggtaccagagactaattccagagagacagagatatgtgacctttcagacagagaattcaaaacagctgttttgaggaaactcaatgaaattcaagatagctcacagaaggaattcagaatcctatcagataaatttaacaaagggactgaaataattaaaaaaatcaagcagaaattctggattgaaaatgcaactgacatactaaagaatgcatcagtctcttaccagcagaattgatcaagaagaagaaaaaaatggtgagcttgaagacagcctctttgaaaatacaaagtcagaggagacaaaagaatgaagcacatctacaagatctattaacagaaaatagcctcaaaagggcaaatctaagagttactggccttaaagaggaggtagagtgaaagagaggggcagaaagtttattcaaatgaataataacagagaatttcccaaacctagagaaagatatcaatattcaagtataagaaagttatagaacacaagccagtttaacccaaagagtactacttcaagacatttaataaccaaactcccaaaggtcaacgataaagaaaggatcctaaaagcagcaagacaatagaaacaaataacaattttaaaaaatacaatggaactccaatacatctggcagcagacgttttagtggaaaccctataggccaggagagagtggtatgacatattccaagtgcgaaaggaaaaaaaatttaccctagaatagtatatccagtgaaaatatcctacaaacatgaaggagaaataaagactttcccaaacaaaagctgagggatttcatcaacatcagacctgtcctacaagaaacgctaaagggaattcttcaatctgaaagcaaaggacgttaatgagcaataaaaatcatctgaagatacaaaactcactggtaatagtaagtacacagacaaacacagaatattataacactgtaattgtagtgtataaactactcatatctcaagtagaaagactaagagaccaattaaaaataataactacatcaacttttccagacagtacaataagataaaaatacaaacaaaaagtttaaaagtggggggaacaaagttagtatgtagagtttttattagttttctctttgtttatgcaatcagtgttgttatcagtttaaaataatggttatgagatattatttgcaaccctcatgataaactcaaataaaaaaatacaacagataagaaataaaaagtaaattaaaacataccactagagaaaatcaccttcactaaaagaaagacaggaaggaagggaagaaggaaaagaagaccacaaaacaaccagaaaaccaataacaaaacggcaggaataagtccttacttattaatactaacattgaatgttaatggactaaattctccaatgaaaagacacagaaagtggctgaatgaacaacaacaacagaaaacaagacccaatgatctgttgactacaagaaacacacttcacctacaaagacgcatacagactgaaaacaaagggatggaaaccaaaaaagagcaggagtagctatacttagatcagacaaaatggatttcaagacaaaactataaaaaagagacaaagaaggttattatataatgataaaggggtcaattcagcaagaagatgtaacaattataaatataaatgaacacaatcctggagcacccagatatataaagtaaatattattagagccaaagagaaagacagaccccaatacagtaagagctggagattttaacatcccattttcagcactggacagatgatctagacagaaaatcaaccaagaaaaatcagatgtaatctgcactacagactacatgaacttaataagatatttacagaacatttaatccaatggctgcagaatccacattcttctcctcagcacatggatcattctcaaggacagaccatatgttaggctacaaaacaagtattaaaattttttttaattgaaataacatcaagtatcttctatgaccacaataaaactaaaaatcaataacaagtgaaattttggaaactatacaaacacatggaaattaaacactatgctcctcaatgaccagtgggtccatgaggaaattaaggaggaaattggaaaatttcttgaaataaattataatgaaaacacaacataccaaaacctgtgagatacagtgaaagcaggactaagagggaagtttatggctataggcatttacattaaaaaagtagaaaaatttcaaataaacaacctaacaatgtatcttaaagaattagaaaagcaagagcaaaccaaactcaaaattagtagaagaaaagaaataaagatgagagcagaaataaatgaaattgaaagaatacacaagatcagtgaaatgaaaagctgcctttttgaaaagataaacaaaattgacaacctttaaccagactaacaaaaaaagagagaagacccaaataaataaaatcagagatgaaaaaggagacattacaactgatacttcagaaattcaaaggatcgttagaggctactataagcaactatatgccaataaattggaaaacctagaagaaacaaattcttagacacatacaatctaccaagattaaccatgaaaaaatccaaaacctgaacagaccagtaacaagtaacaagatcaggtgaaaccctgtctctactaaaaatacaaaaattagccaggcatggtggcacgtgcctacagtcctatctactcgggaggctgaggcaggagaatcacttgaacccaggaggtggaggttgcaatgagccgagattgcatcaatgcactccagcctcggcgacagagactccatctcaaaaacaaaacaaaacaaaacaaaaaacaagatcaaagccataagtaaaagccacaataaaaaagaagcctgggatccaatggcttcactgctgaattctaccaaacatttaaggaagaactaattccaatcctactcgacctattccaaaaaatagtgaagagaatagttccaaactcattctacaaggccaatattaccctgataccaaaagcaaagaaacatcaaaaaaagatgatagacacagtgataaacactaatgcaaaaatcctcaacaaaatactgacaaatcaaattaaacaacacattaaaaaatcattcataggctgggtgcggtggctcacgcctataatcccagtactttgggaggccaaggcaggcagatcacctgagttcaggagttcaagaccagcctggccaacatggagaaacctcatctccactaaaaatacaaaattagcccaggcacagtagctcacacctgtaatcccagcactttgggaggccgaggcagtcggatcacgaggttaggagatcgagaccatcctggtcaacatgggtgaaagcccgtctctactaaaaatacaaaaattagctgggcgtggtggcgcatgcctgtaatcccagctacctggcaggctgaggcagaagaatcacttcaaccagggagtcggaagttgcagtgagccgagattgcaccactgcactccagcctggcaacagagcaagactccgtctcaaaaaaaagaaaaaaaaaattggtgaaaatataaaaacgaaataatactatgatcatatattggttacatattaaaatatatcagttcatgaactgttcgaaacaactaagcaaaatataggtttaattatataattacattattttaaaatttttgcaagtcaaaatgcacatgaactgaaaggcaaaatgcaagttgagagttacacatttttgtttgttttagttttttgagtcagggtctcaccctgctgcccaggctaaaggacagtggcacaattcccagctcaatgcagccaagtgatcctcccacttcagcctcccgagtagatggacccaagtgatcctcccacctcagcctccaccatgcccggctaattttcgtattttttgtagagacagggttttatcatgttgcccaggctggtttccaactcctgggctcaagtgatccacccacctcagcctccaaaagtgctgggattacaagcatgagccaccatgcccagcgatttataaaattagaaatgaaaataatcaatgatcaaaaagcttgctacacttcgtaagtaatcaaagaaaaacaggtcaggcatgatggctcacacctgtaatctcagaactttggaatgccaaggcgactgcatcacttgaggtcaggagttcaagaccagcctggacaacatggtaaaacctcgtctttactaaaaatacaaaaattagcagggtgtggtggcctgcacctgtaatcccagctgctcgggagactgaggcaggagaatcacatgaactcagaggcagaggttgcagtgagccaatacggcaccactgtactccagcctgggtgacagagcaagacttggtctaaaaaaaaaaagaaaaaaaaaacaaaaaaacaaagtgaaatgtgtcttttttcatcaaactggaagatttaaaaataaaataattgtggcaatgtacaatgaaatagattaacatttacattttgcttaaatataagcaaatagaattatccttaacatcttaaccataagcttaacaatctaggaatctaacctaatgaaataactgattttgtggtcaaagatttatattcaaagaagttcatcactgacgggtgcagaggctcacacttgtaaccccagcactttaggaggctgaggcaggcggatcacttgaggtcaggagttcgagagaccaacctggccaacatcatgaaaccccgtctctacccaaaatacaaaaaattagctgggtgtggtggcacacacctgtaatcccacctactaggaggctgaggcaggagaaatgcctgaacccgggaggtggaggttgcgccactgcactccagcctgggtgacagggagaaacaccgtttaaaaaaaaaaacaaaaaaccgtcatcacagcttagacaacacagtgagattccatctctacaaaaataaaatttaggccaagcgtggtggctcatgccttaatcccagcactttgggaggctgaggcaggcagatcacctgaggtcgggagttggagaccagtctgaccaatatggtgaaacgccatcactactaaaaatacaaaaattagccgggcgtggtgacaggtgcctgtagtcccagctattcaggaggctaaggcaggagaatcatttgaatccaggaggtggaggttgcagtaagccgagatcacgccactgcactccagcctgggtgacagagggagaccttgtcataaataaataaataaataaataagcaagctgggtgtggtggcacacctgtggtctcagctactcaataggctgaggtgggaggattgcttggacctgggaggttgaggctgcagtgagccatgactgcatcactgtactccagcatgggtaacagagtgagaccctgtctcaaaaaaaaaaaaaaaaagttcatcaaaatattctgttgatggttcaacaacagaagtggttaaacaatttaaatatactcaaatattgcttcccattgagactaatgtttttgagaatatttaacatcatgagcaatatttatattttaaatataaaatatataaaacatgttacttccgctttctttttcaaaaaaattattttaatcacacataactgtatatatacatggggtacagtataatattttgatacatgtatacaatgtgtaataatcaaatcagagtaattaattagcacatccatcacctcatttattatttgtgttgggaacattcaaaatcctctcttctagctatttgaaaatatacaataaattatttttatctatagtcatcctacagtgctagagaacactagaacgtattcgtcctatccagctataattttgtatccattaaccagtctctttttatccttcccctgctcttcccagactctagtaacctctgttctactctctatttcttataccctttttttttttttttaagacagtctcattctgtcacccaggctagaatgcagtggtacaatctcaccttactgcaacctctgcctcctggtttcaagcaattcttgtgcctcagtctccctagcagctggattttcaggcgcgcactaccacgcccagctaattttcttgtatatttttagtagagatgaggttttgccatattgcccaggctgatctcaaactcctgggctcaagcaatccacccacctgggcctctcaaagtgctaggattacaggtgtgatccaccacacctggcctattctacgatctacttctattgtgatcaacttttttaccttccacatataagaacatatggcatttatctttctgtgcctggcttatttcacttaacataatgtcctccaggctgatgcatgttgctacaaatgacaagatttcattcttttatggtatatataccacattttctttatctagtcatgtactgatggacacaagttgattatcttggctattgtgaatagtgctgcaataaacatgagaatgtagatgtctctttgacatactgatttcctttcctttgaatatatacctattagtgggattgctggatcatatggtagttctcttcttagcttttttttttttttgagacggagtcttactctggtgcccaggccccagactagtatgcagtggtatgatctcggctcactgcaacctccaactcccaggttcaagagattctcctgcctcagcctccctagtactgggattacaggcgcacaccattgtacccagctaatttttgtatttttagtagagacagggtttcaccatagtagcctggctagtctcgaactcctgaccttgtgatccacccgcctcagcctcccaaagtgctgggattacaggcgtgagccactgcgcccagccctctttttggcttttcaaggaacctccataactattttccataatggctgtactaatttacattccaatcaacagtatataatagttgccttttctccatctttttggtaatagccactattttaactggggtgaaataatatctcattgtggttttgatttgcatttcttgatgactagtaatgttaagcagattttcatatacttgctgacaattttacattttctttggagaaatgtctattcagatcaagtacccaatttttaaagtcagactgtttttctactgttgaaacatttcagttccttctttattccagatattaatcccttgtcacatgaatagtctgcaaatattttctcccattctgcaggttatctcctcactgtttcctttgctgtgcagaagctttcttaactggatataatcctatttgccagcttttgtttttgttgcctgtgcttttaaggtcttatctataaaacctttgcacagaccaatgtcctgaagtgtttcctctatgttttcttttagtggtttcatagtttcaggtcttacatttaagtctttagctcattttgagttgatttttgtatatggtgagagataggggtctagtttcattcttctccatgtggatatccagttttctcagcatatgcattgaagagactgtctttttatcaatgtatgttttgggcgtctctgttgaaaatcagttggctgtaaacgtgtggatttatttctgggttctctatggtgtttcattggtctatgtgtctgtttttatgccagtgccatgctgttttggttacaatagttttgtatactttcaagtcaagaagtgtactgcctccagctttgctctttttgctcaggattgctttggctactcaaggtcttttgtggtgcctgccatacaaattttaggattgttttttctaaagaagtctgtggtagacagacttgtaaaatggccaccaattactccagcctcctggtgttcatgcctttgtgtaatctcttcctcctgagtatggactggcctggtgatttgcttctaactaacggactatggaaaatgtgataggatgccactccatgattataaaaaattgtgatttccatcttcctaggagacttgctattcctttctcagctttgtgatgttgaagaagctacatggaaaggaattcagagcaacctccagccatcagccagtgagaaaccaagcccttcaattcaacatcccttcaagaagagaattctgtcaccaaccaagttagtttggaaacagattattccccagccaagcgctaagatgagacaccagccctggctgacaccttgactacctcctgtgagagaccctgaaacagaagacccatctaggctatgccgattcctgacccatggaaacccatgccataataaaaatgtatgttgttttaaactactaaatttgtggtaatctgttatgcaacaataaataactattgtaccctacatggaaatcctgctgaataaactgcctggcaatttccttttttattttttgagatggagtctcgctctgtcgctcaggctggagcacagtggtgcaatctcagctcactgcaagctccgcctcctgggttcacaccattctcctgcctcagcctcccaagtggctgggactacaggtgcctgccactagtcctggctaattttttgtatttttaatagagacggggtttcaccgtgttagccaggatggtctcgatctcctgacctcatgatccgccctcctcggcctcccaaagtgctgggattacaggcatgagccaccgtgcccggcctttttttttagtttttgtttttttgtagaaacagtatcttgctggcggggcctggtggctcatgcctgtaatcccagcactttgggaggccgaggagggtggatcacatgaagtcgggagtttgagatcaccttggccaacatggtgaaaccctgtctctactaaaaacacaaaaattagctgggtgtggtggcaggcgcctgtagttccagctactcaggaggctgaggcacgagaatcgcttgaacccaggaggcggaggttgcagtgagccaagatggtgccactgcactgcagcctggtaacagagcgagattccgtctcaaaaagaaaaaaaaaaaagaaacagtgtcttgctatgttgcccaggctgatctccaactcctggcctcaaacggtcctcctgccctaccttccctggaactctgcccagccaggattcttaaatcaaatcacagtgctggaactgtgcccagccaggattcttaaatcaaaatatttttccctctatttataaatatttatccaaatatttatggggggaaaaaagtcacaggtcacacagtggccagttctgctttagctagcagtggttcccaaacttgtctgtgctttttttttttttttttttgagtcggagtttcgctcttgttgctcaggctggagtgcaatggtgcgatcttggctcactgcaacctctgcctcccggattcaagcgattctcctgcctcagcctcccgagtatctgggagtaaaggcatgaaccaccacgcctggctaattttgtatttttagtagagacagggcttctctatgttggtcagcctggtcttgaacccctgacctcaggtgatccgcctgcctcgacctcccgaagtgctgggattacaggcgtgagccacagtgcccagccttgtctgcactttagatcttcttgagatcttttaaaaattccaaagtccaggccatactcccagggcaatcaaatcacaatctgctggggaagggaaagggacaatggcatcagttgtccaagctccacaggtgatttcaatgtgaagacaggtttgggaaatcactgagctaaagttttatctgtgtgatcaagaaaaagctaattcaagatgacagagagagaggcagctgaatgaaactaactatatacacctgcccttctctgagatcgtaaggtagccttgatttccccctgcaaagttatgaattctgaaaatatcagagagaaggccaaataaatgcttattttgctttttggatttatccatgcctccattcgcctccagaattatgaacaagtgagaaattcacctttttgtcttttcttggtacttttcatggaaccaataaagaattctgccatattacatgtattcaacataactaataagacatgacttgaatgcttttttattaagcagatcttatttaatttagtcagttttgatccaacccacatgccaaatgcagcttgccaaagtaaaataccctatggacattaggatcaaaatgcctcctttttaaaaagtaaagtctatttataatccaatcctttaagttgaaattaggccttttataaattgaatttcatgtattctacagaatcaacagacctgcttaagaactctctgaccactctcagaaaagttagtcagtgggacccctctccattcctcccaggacctaaacaaaaaagaaaaagggcaagaggaagaagagaaacatcagaagaaaagactacatataaacccttataaacctattcaaaataaatttttgtgattggccaaattccttctctctaccactgtttctgctaattttactctagaaagagttgtaaaaggccaggtgctgtggctcacgcctgtaatcccagcactttgagaagccaaggtgggtggatcacctgaggtaaggagttcgaaaccaacctgaccaacatggcaaaaccccatctctactaaaaataaaaaaaattagccaggcatggtggcgcactcctgtagtcacagccactcgggaggctgaggcaggagaatcacttgaacctgggaggcagaggttgcagtgagtggagattgcaccactgcactccagcctgggtgacagagctagactgtctcaaaaaaaaagagttgtaaaagacagatgacctatctacaatttctagtccagtggcttttattaaggaaagcttataatcatcaaagaggctcaatatacttttgaaataccacagtagtggttacacaagtgtgttaattttataattcattaaccttataatttgtgtgcttttctttgtatgttacacatcaattaacacatttttacaatagatacatttgtcctgggcagaatctctgaaagattctaagtaagcaggtatcagaaatagtcaaggttacatgatttgtcctaggtcacagatatagttagctacaaatgaagtccttcatatcactttcctactctttctgttataaattgtaaatatgttgatattattatactttttaatttaacattactttcctacttaagactatgaaaaaaataagtattacaagtgagaactgcaaaaaacaagcaaacaagtaaatagaaaacacatgtcctgggttcataactgtgcactattgaagctattgtaccatccatatgaggaaattaaataaagcctaacgcccatgcaaccattttttttctttttttttttttgtttgtttttgagacggagtctcgctctgtcacccaggctggagtgcagtggtgcaatctcggctcactgcaagctccgcctcccgggttcacgccattctcctgcctcagcctcccgagtagctgggactacaggcgcccgccaccatgcccagctaatttttttgtatttttagaagagtcgcggtttcaccgtggtctcgatctcctgaccttgtgatctgcccaccttggcctcccaaagtgctgggattacaggtgtgagccaccgtgcccggactctgtgcaaccatttcttaacctcaatatcctttttcaaatgctttcaatgtagacatatgtcaaactattagtagtaaaatcaactgtgtacctattcagatagactagcattatttttgatatgaaaatatagggtgatagaacggaaaaagggctaggctgagcattgcagagtgggttttagtcatggctgtcccataaagttgttttatgatttagggcaagacataaatctctctggtctaagagtattaaaatgagaggatgaacaccagagctaggactaaacagaatctcaggttccttccaggtttaagaaaactcaaggactatttaacaacaacaacaacaacgtgtatatatatatatatatatatatatatatatatatgctttcaaaatgcattttacaaatgattatctctattcaaatatgtttaaagtagctttgtaaaataaaaatactagaattcctctggcacctgcttcataaatacaagcatattcttcagcttgtatcaaatgcaaacctctgatctgttgtctaggtgcaacaacctctccctctcagttggctaataataacattgttgattctttatcatcatgagactcttttgcctgcatttaaaaaacttcattttatgaatcaatttcagatttacagaacatgagttatttttatgagaaatatgtatctctcaatatgtaacagaagtctttcttaatttctaataatctactgtaatttgaaaactttccatggatgcatttatttgactaccctttaccaactgcctactagcactctgctaggcactttcctgctcctgaagttactatacaagaacaaaaagactgtggaatggttaattgaaacaacattatttcatgaatgcctccatctgaatattacacttatagtatttaaaaaattaagttggccttgtaaccacacaaccttaaatgtttcaggataacttataagacattgttaaagtgtctaaataaacagttaaatgctcactgttaaagacaatttgcctaggcataactattataagatccaatttcatcctccctataccctttcatgaggtccttataaaactatttcatggtggccgggcacggtggctcatgcctgtaatcccagcactttgggaggccgaggtgggaggatcacaaggtcaagagatcaagaccagcctggccaacatggtgaaaccctgtacctactaaaaatacaaaaaaaaaattagctgggcgtggtggcatgtgcctgtagtcccagctacttgggaggctgaggcatgagaatctcttgaaccagggaggaagaggttgcagtgagctgagattgcgccactgcactccagtgtggcgacagatggagactctgtcttaaaaaaaaaaaaaacaacaacaaaaaaactatttcatgcttattctcagatctggggctcccaagggaaaatttgtgcagctctccagccaaatcagagaaacttaatgctctgaaaggatcaacaaaatgcctgtcaaggtgattggcatttcaatacaacaaccctggtttgctcttggtagggataatagacaatttaagggattaggaaatattaacattaatttttaaacttcaatcctaacttcttagtataagaaacaaaagataaattagtaaaacatgaaacttgagatttccaaaaccactcatcccaacacatattataaacatattataaaccgtaagtcagaggctcagtgagatttttcccacgttgttacataaaaaaaacaaagaaataaatctgtgcccaaattgcaacaaagagaaaaaaaattacaaatgaataatacaaaaacagaaataaaatctagaagaggtcaggcgtggtagctcacgcctgtaatcccagcaccttgggaggccaaggcaggaggactgcttgagcctacgagtttgagaccaccctgggcaacatagggagaccccacttctacaaaaaaaatttaaaaattacggccggtcacagtgactcatgcctataatcccagcacactgggaggctgaggtgggtagaccacctataatgaggtcaggagttggaggccagcctggccaacatggtgaaaccctgtctctattaaaaatataaaattagctgggaatggtggaacacccctataatcccagctactagggaggctgaggcaggagaattgcttgaacccgggaggaggaggttgcagtgagtcgagatcacgccattgcactccagcctgggagacaagagtgaaacactgtctcagaaaaaaaaaaaacaaaaaaataggctgggtgcagtggttcacgcctgtattcccagcactttgggaggccgaggagggtggatcactttaggtcaggagttcgagaccatcttggccaacatggtgaaaccctgtctctactgaaaatataaaaattagccaggcatggtggcgggcacctgtaatcccagctacctgggaggctgaggcaggagaaacgcttgaacccacggggcagaggctgcagtaagctgagactgcaccactgtattccagtctgggcaacagagtgaaactctgtcttaaaaaaaaaaaaaaaaggtcattttggagacaactggagaaacttacagacttaatgttagataatattaagaaattactgttttgttaggtgttaataatggtattgtgtttatgtagaagaatatccttacttgcaggtgatgtgtgctaaaatattaaaggcatagtatcatgatatctttatttttaaaaagtttaacataataaacatattattaaacatatgacaacatgttgaatatagatggtgagtataagggtggttcactgtactattattcctggggctttttctatgttttaaagttttaataaaacatttaaaatatcaaaaaaagcccacaaaactgaagaactgctattatactagaagaaaaaatttatgaaattcaattttaactagtagctagtggcactataaactggtagttgttctgaagaataatctgacaatgtggctaaaaagtgatagcctcagacctaatgaaatcattttagggaatatattctaagaaaaaaactggaagaaaaaagatttataaaaagatgtaacagcgctacaatttagaattgtaaaatagggctgggcatggtggctcactcctgtaatcccagcactttgggaggctgaggcgggcagatcacgaggtcaggagttcgagaccagcctggtcaacacggtgaaatcccatgaaatacaaaatcccgtgaaaatacaaaaattagccaggcatggtggcgcatgcctgtaatcctagctactcaggaggctgaggtaggagaactgcttgaacctgggaggtggaggttgcagtgagctgagatcacgccactacactccagcctgggtgacagagtaagactccatcttggggaaaaaaaaaattgtaaaatataaataaaaacgaactgaaaatcacccaaatgccaaataaccagagtattttagactttggttgtcatatatccattaaaaatgataaatatacagatgtgtagaaaagtacgtcaatatattgccaaatgaaaaaagactaaaaaaacctttatatgaattaaatttgtaaagactgtatgaatatgaaaatgactcagaagttatgtacttgcggtatttaaacataatttttttttgttttttgagacggagtctcactcttgtcacccaggctggagtgctacggcatgatcttggctcaccgcaacctctgcctcccaggttcaagcaattttcctgcctgagcctcccaagtagctgggattacaggcgcacgccaccacgccaggctaatttttgtatttttaggagagacggggtttcaccatgttggccaggctggtcacgaactcctaacctcaggtgatccacccgccttggccttgcaaagtgctggaattacaggtgtgagccacagtgtacagccttaaacataatttttaaaatttcatggggacacgtgctattagaaaaagtataaacaatgcaaatataaaatcaggaagaactgcctgggcacaaataaagaaagcacctgagggctattactgaccacaattcaaatgagtattcacaatttaaatacagtactatcctgggcaaggccaacattgctaccattaaaaagacacaggctgagcacagtggcacacgcctgtaatcccagcattttgggaggcaagagtatcgcttaaacccaggaggttgagactggcctgggcaacataggaagacccattctctaccccaaaaaaaaaaaaagccaggtgaggtggtgaacacctgtagtcccacgtgttcactcaggagactgaggtaagaggatcgcttgagcctgggaggttgaggcagcagtgagccatgatcacaccactgcactccagcctgggtgacaaagcgagactctattttttttttaaataataatttaaaaataaaaagacacagaaaaagagcatatcattagcctggacagtacccagtcttcctcaattctatttgttattttaaaacaatactcagttttcctcaattctttccaatatttttttaaattatggaaaaactgaagaagtttcaaagaaaaaccaagaggtaaagaataggatggaaaagaggtaattttgaagaatggtttgaaatcaaatgaagtgtgacatgactattaacactgaaatatccatggggaggcttttgaatggagaccctgaaaagctgatgtatctctcaatgcccacagatgactcaccaagaagagagggctaacaaaaccctcaaagtttgttgttttacagaagagagatttctttattgtgctggcaaaagttactggcataggaaaatgagggaggctgggtgtgttgtcattgaccatctgtttttctacagggtgtttacttatccatgatcacctgatcatattagaatgtctctaaaacttgactcagttactcaaagcttgaatcaattatctaccatttcaaaattccgcagtgccatcctgctcccacacactggtcactcagcaacattcaaatgtcttagacctggcatccagggccccaagaaagtacgtcggcttcacttctccacaactcctcaacaaaccagcaaatcagacttctcactatttcattacctaaatattccttacattttcctatgtccatcattcctttggttactctctccttaatcccatttgttgcaatcttacccttccattttaataaattttaatttaatgcctctatgttatctcaaacactacctgttatgtgttgacttgtgccccccaatcccatccctgccaaatatgttagtcttaactctcagtacctcagaatgtgacctgatttggaaacagagtcgctgcagaggtaatcaattaagatgaagttactcctactggagtagggtgggacctactagtgaccttataagggaaatttggacacagagacatacagggaaaacgccatgtgacaacagaggcaaagatggagtgatgcagctacaagccaaggagcaccaagaattgatggaaggctcagcctctcaagtaggtgcgattagatgcacatgccagcacgcctggctaatttttgtacttttagtagagatggggttttaccatgttggccaggctggtctcaaactcctgaactcaagtgatccacccaccttggcctcctaaagtgttgggattacaggtatgagccagctatttgggaggctgaggcaggagaatcacttgaacctgggaggcagaggttgcagtgagccaagtttgcaccactgcactccagcctgggcaagggagtgagatgctgtctccaaaaacaaacaaacaaacaaacaaacaaaaaagagcagctgggtgcagtggctcacacctgtaatcccagcactttgggaggccgaggcaggtggatcacctaaggtcaggagttcgagaccagcctgaccaatatggtcaaaccccatctctactaaaactacaaaaaaattagctgggcgtggtggcagttgcctgtagtcccagctactcaggaggttgagacaggagaatcacttgaacccaggaggcggaggttgcaatgagccaagatctcaccactgcactccagcctgggcaacagagtgagactccatcacacacacacacaaaaaagcaaaagcaaaagcaaaagaaaatgtatataaatgggtactacggaactgatattcaacagattcaatatcagtaaaggagctgattaatgggaacttttgttgcctttgtgtgtgtgacggagggggaggggttgcagctggttaatgctaaatacaaactgaaatatctgtttaaagtatgaatgccctctgaatttggtgctcattaatattaactgatatagttaatttattaactgataatgaatattataactgacatagaatacacaattcatcacaaagtaaaggtatggtcctggccttctgctttatagagattgtatatcaaataaagcatatgaccaactctagggctgcattcctccttccatcaaagccatagtatttcatttgtgtatacatctaaatgtaactctagttatttactaattaactcagaatgtttattgagctcctaggcagctactttatgtcctttttagaataaggtgaggtagaaaaagatcacatttaaaaaaataaatgaatataccagacatcaaaataggcagacactggagctgaagggagggaagggggaaggcagagacagacaccagcccagtcctaaaggagcactcacccaatctagtgagaagtaagagagtaaactagctccatatctctcctttctccccatgctgatcctacacttcacaatcaggcttcctttcctaacgtacagctttcatcacatcactggcgaaaaacatttgatgacttcccactacctagtcaatcaagttcaaacttcccagcttggaatagaaatgggtattcaaagccttccatgatttgattatatggtatgcagagattaggaaggcaggctttgaaattagactacctggactcaaatactttctgtatcaattgttagctctcttcttcattttatatgtaaaaagggattaaaaaccagtgcctacctcatcaggttgttgtaaggattaaataaaatgctacttatgaaatacttagcacattatcttgcaaatagtaagcatgcaaaaaatgtgagccattggccaggcatatggcttgtgcctataatcctagcaatttgggagaccaaggcaggagatcacttgagcccaggaattaaagactgcaatgagttataatcacgccactgcactccagcctgggcaacagagtaagaccctggttctatttaaaaacaaaacaaaacaaaacaaaaaaaccctacccaaagaacactggggggaaagaaaagccactactactattaatttttttaagttttatttattttaggttttatctattattgttactattgttcatctccatttccacccttaattccaacaacacccttataacaatcctcttctccaagcaaagtggactctttaccatctcctaaatacccacctctgtgtttatgctttcactcagcctggaaaatacagcactgtctcatctccaagtattaagatactaactattcttggcagcttcgttcacagaccacctctttcaggtaccattctctagtatcccagctccataacacattacagacattcctcagcatagaaaccttggctagattcatcttggtatcttgcagagttctagccagtttccagaatacatggtagggctcaacaaatgtttgagaaaataatacctatatttcctttctcgtccaaccactctcttagacaacagctccacaatacaagtaaaaagagttcttctacagtatttcataaagctggccagctaattttctatcaccaatgtggtaatttctaatacagtacttaatacatagtagatgcctaaatattcaaggagctaagctgaatttcacctcatcttttaatttcatttatcattctattcattatgatcaagtatggctcatccttagaaataggttttagtatttacttgcccacaaactcatctgtcaatttctggccatcccccccaccatcccaatatgtcatttactggtttgggggagacaatattcaatacctcaataaagtaagaatcagaaaattaaatgtctgcagggccataaaaataaagagcaaagcaagacagcaaggcagactatggagaactaggaaacacatctcacctaaaagtttcagctggttaccgctataaatgaatatgggcttgctgttgacagatcttccaatttttcaaggttaagtcagaaactcagaggtctgtgtacatttttaagacattaaaaatattgtgtaaaccaaacaaaatacttatacaggtcaaatccaaccacaggttgccagtttgcaacctctgctacagaagttctctgcaaaagtgatggcgtgagaagagttctatcctagcagataatctaaggcagcccctaaaactaagtagctccttggaagcatctcctgcaacactcagcccaactctcaccattctgattgacctgaaaaccaaattaatttggcaatttaattgagcaaaatgagcccctgctctgtaccaggtgctgaggaatcagaaatgaacagtagtgctaaagtacagctaatatttattgagcatgttctaggtgccaagcactgttttacacgttatgtatattgactcatttaatcctcacaaaaccctatgagattactattatccttaaagactgaggcgcaatgaggttttatttgtccaaggtcacacaatcagcaagcagcagtgcttaataaggacctgagacagactccaccaaaaagagctcacaatttgaaagcaagccccattcaataaatgatgctgggatcactggttatacatagggaaaaaaaatgaaactggacccgaccttacactacacataagaatccattccagatacattaaagatctaaccattgaaaacaacagtaggtattccagaatataaagaataattgcaggctgggcacagtagctcacacctgtaatcccagcactttgtggactgcttgagctcaggagttccagactagcctgggcaacatggcgaaaccccgcctctacaaaaaatgcaaaaagtagcagggcatggtggcgcatgcctgtggtctcaactggcatgggaggtgggagggttgcttgagcccaggaggttgaggctgcagtgagccgagatcgcaccactgcactccagcctcggtgacagagcgagaccctgcctcaaaacaaagaataactgcaaatcttaaaggaaaagattgataaagttgatactaaaattcagaactttttaacaaatgacaccttaaaacagatgttttaaaataagcaacaggccaggcgcagtggctcacacctgtaatcccagcactttaggaggccaagacgggtggatcacttgaggtcaggagtttgagaccagcctggccaacatgatgaaaccccatccctactaaaaacacaaaaatcagccaggtgtggtggcacatgcctgtagtcccagctacttgggaggctgaggcaagagaatcacttgaacctgggagacggaggttacaatgagctgagatggcacgactgcactccagcctgggcgacagagcaagacttcatctcaaaaaaaaaaaaaaaaaaattaaaataagcaagaaactgggaaatgacatctgtaatatctaccaacaacaaaggattaataatcagaatatataaataaatcttttgtaaaagacaacccaataaaaaaaatggcaaaacaagcccgagcattatctaatccgtgtaaagctggcactaccacagttaccacacagtacactccagaacaatagaccttgccatcactgactgatataaatattcaggggtctgtgttatgctgcaggtacacagagcatgggtaatccagcccaaagggcagagccaagacgtttattcattctctatcatcatatagacattggatggcaaattagaggttgaacatccaacactcaaacacatagatcaggggttggcaaatgtttttgtaaagagtatttccagctttgtgagctgacacaacacatctctgtcacgactactcaactctgctattggtaccacaaaagaagatatggacaatatataaataaatgagtgtggctatgttccaataaaacgttatttacaaaaacagatcgtgggccagatttgacctatggaccacagtctgtcgacctctgacatagatagttgtgctttttctacactataggtaggacacttcccatgttttcccctgtcttttatgtctgctgacacctctgatttccttaaccaaaaactacaccacacttgacagctttgcaatggtttccaaaactctattactctgccaaaaaaaccttttcgcccttattatcaatgagaattctcccctcattttcctttcacttttttttttttttttgagacggagtcacgctctgttgcctgggctggagtgcagtggtgcgatctcggctcactgcaagctccgcctcccgggttcacaccattctcctgcctcagcctcccgagtagctgcgactacaggcgcccgccaccacgcccggctaattttttgtatttttagtagagatggggtttcaccatgttagccaggatggtctcgatctcctgacctcgtgatccgcccgcctcggcctcccaaagtgctgggattacaggcgtgagccaacacgcccagacttcctttcacttttttaaacctctttgacagacaccaccccaaaccagaaatttaaaaaactccccctaagccactcacaatgtcaataatcaacacctgcaaattctaactccactcaatgcccacagcctctgccttagttcagatcctcattacttctaactctgctcagtgcccacagtctctgccttagttcagatcctcattacttctaactctgctcagtgcccacagtctctgccttagttcagatcctcattacctctctggtcttcagtctaccctccttccaaagaacatccatttatctcctagaaattaaacctccaccacatactccccttctcgaagatcttgaatgcctctctcagctaaggattcagtccaaactccttagcaaggtccttcacaaccaggttcctaacatggtcttcctagtctcatctctggccatgctttcacacacattctatgctccagccacattcagttattaatacattccctgaaaacgtgtctttacctgaaaggcccttctctccatttcactggcaaattcctgtatcttttaggacacatctcaaatgtcaccccttcgcaacaccttccctgattctttgagcagacacacccatctccgtgtccttatagcgtttaataactcttctttggcatcgaccatcctgaactatgattgttcacatgtctacttcactcatggggctgcatacccaaagtgaagtgactctgccttaaaaacttctgaagctacagagcccagtataatgcttgatatgcagtagatgccttgaggcacagtaaacgtttgctgaatggaagacatgcctggcagtaggagtagggtttcttaacctggggttcatagacaggagtctatagataggacttcagtggggcttgtgaacttggacagggagaaaaaaatctcttttactaacttttaactgaaaattaccattctattcaaatatgagtgtaggtaacataccattctagtattagcagttctgtgactctgtaacaacagaaatctcaaatatctttatatcatactacaattgttgcatataatcttgaagtagcctttatgcgcatcatgtctttgaaattataattatcggatccatcactaaatctgatttcttaacgtgctgataaacaagtatatgcatattagatttgtatattttggaaactgtattttaatataattggtgttccttataattcaatgtactttattttatacaattaaaaaatattattctgaaaggggtccatggcacagataaggtcaggtcttcctgcattagaaaaacccagaataggctgggcgcggtggctcacgcctgtaatcccagcactttgggaggctcaggtgggcagatcacttgagctcaggatttcaagaccagcctgggcaacatgttgaaaccccaactctacaaacagaaaaaaaagaaaagaaaagaaaagaaaaacccagaacaaatgaattgtgttgctgtatatacatatggtattgacagttttattttatatatgcccgcataatatttttgttcgctaattctctttgattatatggggccctggacctattttccatgactaatttgcatatttccttcagaactctcccatagcccatgcgaactttgaattcttctctaacatgatccaacttcaattaataaaatagagactctgggtgtctacaatttttcacttttcttttttaggattttgtgttcctttgtggtaaacacctagaagagaaggagcatctctcttttttttttttctttagacagtgtcttgctctgtcgcccaggcaggaatgtcatggaatgaccatagcatggctcattgcagccttgacctcccaggctcaagcgatcctcccacctcagcctcctgagtagctgggactacaagtacaagccacatcaggtggctaattttttttatttcttttgtagagatggggtctgccagctcctgggctcaagaaatcctcccaccttggcctcccaaagtgttgggattacaggcgtgagccactgtggctggccggagcacctcttaaaactctagaaagttagaaggtctcaaagataacttctttgcacaattagagatgaaccaggaaataccaaataactggctgcctatacttttttgtattcccttcagcctttgtattgccacactcattacaggaagaaaacaaatttaatagttatctggtatatactgttatgcttcatttcttgttgtttttgtttgtttgcttttagtttcatcacaagaatgttatgcttcatttcttaacacctttctcccagctagcaaattcctttaaggcaatgtgtttagtgaggaagcagccgacaatttctagtacccctctgccactaacttgtaagatcttgaaaagtcaactttacctttctatgtttcagctaaaatcactacctgatttgaaatctttacttgatctctcaggcctttgtagtttttatacattcactcttcttcaccattttactggcttcaataacgcctttctgatgacctctccaggtgactctgctcttaagctgtgggctgtccccttccagggaagacaccttgggtcaccgcccccaaacagccaggtccctccttttaaagacacacacaactccctaagttgataaaggttctctccttccttgccaaccagttccactctctgtgcctcttttgctggccagctcctgcacccaaacctcagtctccctttgtcccccttttctctcatcaaacacctcctttttcctgttgcttcccccaagagggggtggaggatgcttgggacataagtcttcagagccttgggagttatacagctttgcaattcagccccagtaccccaaggactgccccaatctgaaccagcgtctgtacccaaagggccctcattcctcatcaatcacctccttccctcccagcaaagaactgctccagccctgacagcctgagcttggcccccatgcctccaccccaatccccaggtcctacctgcattagggctctaacaccgcctaaggcctaacccagttccacgtcctgccatcctctcagcccatagaccccaatcccggttcccttcggacccagtgttccttctccgcgaccctgaccacgaccccacgaccggctcccgcctgttccccaggcctggagcgccaccccgtgcagaccccggccagccctgcactccctcagtgcaccggcccccgcgcccagcaccctccccacccagcccggccgccgctccctccagcgcccccgcccgcaggcctggggcccgctccccaacatggcgacggggacacaagcgcggcgggcggggcggctccgggccgggcccgctctcagaccgtgccactcggtcgcccggcgccatttttccgcgcgggcccgggcggcgcctcctccccgcgaagccagcccgacaaggaccgcggacgcccggcgggcccaccccttacgggcccgcgccgccgtcccctcacctgagcgcggccccggccctcccgggcgggccttggagcgccggcccgggccgtgcgtgcccgccgccctcggtgcgtccgtccgtcagtcctcgcgtgcgcccgtctgtcccgccgcccgcgcccggccgcccgcagcccgacccggcagggcctcacggagccggcggggagggggatgggccggaccgggccggggagggagggggagggagggagagagggagggagcgcgagagggggcggggcggactcgaggggcggggcattgcccacgtgaccagacgtccccgggagcgcgaggtggagcgcgcgccagctcccttcggtgctgagtgcttagtgctgggatctcgtgggtctctgtcggctttccagggctattctctcgccagtgagtcccacttcggaagcacacattgcacagtcttttgcgagcgctctgagtatccttggacatggcaactccaagcctcagtttacccatctgaaatatggggaaaatcatagtgcttgtgaagagcaaatggaggtgggcttggaaagcacttgtcaccgtgcctgacacatactgtctaataataagcttaatgggatatagataaaagctttcattattatttgcctctaaatccctctcttctttttcccatcattacctccctagcaagctaaaatgctcagtaaatagaattattgatcgaacgagtgtggcccctcccctcttcccaaacgtagaaaggcctcctcagcactggacttcatgtctgtcatacaggcctggattcatatctggctttcactcttttttaaaaattttctgttttttcccacactacactgatgtattttttaaattttcgtaagtacgtagtaggtgaatatatttatggggtacatgagattttgatacaggcatgcgatgtgtaatcacatcatggtaaatggggtatctagcaactcaagcatttatcctttgtgttacaaataacccaattatactctagttattttaaaatgtacaagtaaattttgtgtgtgtgtggttttttttttgttttttgttttatttttgtttttttgagacggagtctcactccgtcgcccaggctggagtgcagtggcgcgatctcagctcactgcaacttccgcctccctggttcaagggattcgcctgcctcagcctcctgagtagctggtactacaggcgcatgccaccacgcccagctaatttttgtatattttttaagtagagatggggtttcaccatattggccgggctggtcaggaactcctgacctcatgatccgcccgcctctgcccctcaaagtgctgggattataggcgtgagccaccgcgcccggccaattgttttttactgtagtcaccttcttgtgctagcaaatactaggtcttattctttctaactattcttttgtacccgttaatcattcccacttcccacctacctccccattaatcttaccagcctctggtaaccctccttctattctctatctccatgagttcaattgttttaatttttcgctcctggcccggcatggtggctcacgcctgtaatcctagcactttgggaggccaagatgggcggatcacctgaggtcaggagttcaagaccagcctggccaacatggtgaaaccctgtctctactaaaatacaaaagctaggtgggcatgatggcgggtgcctgtaatcccagctactcaggaggctgagacgggagaatctcttgaacctgggagatggtggttgcggtgagcctagctcgcgccactgcactccagcctaggtggctgagtgagactccgtctcaaaaaaaaataaaaaatagttaattttttgctcccacaaataagtgagaacatgtgaagtttgtctttctgtgcccggcttctttcacataacataatgacctccagttccatccatattgttgcaaatgacacgatctcactcttttttaatggcggaatagtattccattgtgtatatgtacattttatttatccattcatctgttgatggacacttaggttgcttccaaatcttggctgttgtgaacagggatgcagtaaacatgagagtgcagatctcttccatacactgatttcctttctttccggtgtatacctaagaatgggattgctggattgtatggcagctctctttggctttcgctcttgatagctgtccttgcctctctgaacttgagcatcttcatctgtaaaatgggagttggggtctgttctgagcatcccaggagatagaggatgagcaggtggattgtaaactaattaaacaaatcagtcctactgatcccatagaagaaagggagtcaggaaccctttcattccatcaatatttattgagtacacacagtgtgcttggactggtgtagtagatacccaccatcttttcacattaccctgaccgccctctaatctattctccaccctgctgtcagagtaatgtttctaatgatcagaaatatgatcatgtcactactctacttaaaagtatctgttgatggccaggtgcagtggctcacacctgtaatcccaacactttgggaggctgaggcaggtggattgtttgagcccaggagttcaagaccgggctgagcaacatggcaaacgctgtctcaacaaaaaatacaaaaatggctgggctcagtggctcatgcctataattccagcactttgggaggtcgaggtgggtggatcacgtcagctcagaagttcgagactagtctgggcaacatggcaaaaccccatctctactgaaaatacaaaaattagctgggcatggtggtgcacacctgtagtcccagctaatcgggaggctgaggcatgaggcaagaatcacttgagctggaaggtggaggcttcagtgagccgagataacaccactgccctcctgcctgggtggcaaagggaaaccgtgtctcaaaaagacaacaaaagacaaaaacatagcaggcatggtgctgcacacctgtggccccagccactttggaggttgaggtgggaggattgcctgagcctgggaggttgaggctgcagtaagctaagatcatatcattgcactccagcctgggcaatagagtgagaccctgtctcaaaaaaaaaaaaaaatctgatggctctacattgctcttaagataaaggccaagccgggcgcggtggctcacgcctgtaatcccagcactttgggaggccgaggcgggcagatcacaagatcaggagatcggaccatcctggctaacacggtgaaaccccgtctctactgaaaatacaaaaaattagccgggcgtggtggcaggcgcctgtagtcccagctactcgggaggctgaggcaggagaatggtgtgaacccaggaggcggagcttgcagtgagccgagatcgcgccactgcactccaggctgggcgacagagcgcgactccgtctctaaaaaaaagataaagaccaaataaatgttggcctccccacatctctagatttatcttagggccctcttcccctttctctgggttgcaactacagtgatatttcttacacattgttctccctcctttctgagaacccttgcacatgctgatccccctgcctgcaatgctctccccacttagataactctcagtcttcagatcccagttcaaacggggctactccaaggataccttccctgacccattcccacacaggttttcttagcacgatatgcttgtccttagtagaatacactgagtcattattacctgtctttgccactagactatggacaccataaggaagaaaaccttatccatcttgtttaacattgttttctcagcatatagcacagcacctggcacagagtaggtgctcagtaagtatttgttgcgtttgtgaatcctaagcacaatactaggtattgggcccaagagggcagacaggagcaaagagaaccacaggcaaccgcaacaggggggcaccttagacctttgagcctatgaaattaacaccaaataaatttaaaatatcctggaaaaaaaaacttttctgaagctttttattttaacttttaaaaactgaaatataatttatatacaataaaatgaaaaactattaagtgtatatctaataatttttttgcctacattcctgtgttaccaccacctagatcaagttatagatctatcaacccagaaagttcccttttgttctcttttgtatgttctcttctaataaatacctgctcccccagatgtaaccattattctgacttctagcaccatagattaactttttttttttttttgagatggagtcgcgctctgtcgcccaggctggagtgcagtggcacaatctcggctcactgcaagctctgcctcccgggttcacgccattctcctgcctcaacctcctgagtagctgggactacaggcacccaccaccacgccaggctaattttttgtatttttagtagagacggggtttcaccgtggtctcgatctcctgaccttgtgatctgcccgccttggcttcccaaagtgctgggattacaggcatgagccaccacgcccagccgtagattaactttgacagtttttgatctccatagaaacagaaccatacagtttgtactcttgtgttagcctggaaatctgacatagccaaagggtgattttttggataaagatacaattaatgaatgacttgattaattaacctgaaagactgaatgaaaagctctggctacttcatcctacagacacagaggtcctgacaacagccagcccagaggctgagaagacctcactgacatatttccaaacccacaaagacttctagagataagaaagctctcaaagattccagaaactcagcaataagactgggtgctatggctcatgcctgtaattccagcactttgggaggccaaggcaggaggattgcttgagtccaggagtttgagaccagcctgggcaacacagtaagacttcatctctacaaaaaatttaaaaattagctggtcatggtcgtgtgtgcccgtaatcccaactactcatgagactgaggtggaaggatcacttcagcctgggaattggaggctacagtaagccaagatcacatcactgctctccagactgggtgacagagtgagaccctgtctcaaaaaaaaaaggcaaaggacttgaatagacatttcttcaaagaagatatacaaatggctaataagcacatgaaaagatgttcaatctctgtagtcattaaggaaatgcaaatcaaaaccacaatgagataccaattcataccctatttatgtatgtatgtatttatttattgagacagaatctcactctgtcgcccagactggagtgcagtggtgcgatctcagctcactgcaacctctgcctcccaggttcaagcaattcttgtacctcagcctctgaagtagccggaattacaggcgcgcaccaccatggccagctaattttttgtatttttagtagaggtggggttttgccatgttgtccaggctggtctcaaactcctgagctcagtcattccccctgccttggcctcccaatgtgttaggattacaggcgtgagccacggcgcccagctgctgttatttttttaaaaggcagaaaataacaagttttggcaaagatgcggagaaattagcacttttatgcattgctggtgggaatgtattttgtttttgttttttgtttttctttgagacgatctcgctctgtcacccaggctggagtgcagtggtgcaatctcggctcactgcaacctccgcctcccgggttcaagcaattctcatgccccagcctccagagtagctgggattacaggcatgcgccaccatgcccggccaatctttgcattttctgtagagacagggtttcaccctgttgcccaggctagtctcaaactcctgggctcaagtgttccacctgccttggcctcccaaaatgctgggattacaggcgtgagccactgcgcccagccaggaatataaattgatgcagccatggtggaaaacagtttggcatttcctcaaaaagttaaacataggcgcccctgtaatcccagctacttgggaggctagggcaggaggatcacttgaacccaggagtttgagtccaccctgggcaacatagcaagacccagtctcaaggaaaaaaatgttaaacataggattaccctatgagccagtaattccacttctgggtattcatccaaaataagtgaaatcacattagtaccactgtactccagcctgggtgacagatgagaccctgtctcaaagtttaaaaataaataaatgaacaagccaggtgtggcagcacatacctgtggtcccagctacccaggaggctaaggcgagaggatcagttgagcccaggaggttgaggctgcagtgagccatgtttccattcctgcattccagcctgggtgatggagcaaaaccctgtttcgaaataaaatttaaaaaataaagaagtgaaagcagagtttcaaagagatatttgtgcacccctgttcacagcagcattgttcacaatagccaacatgtggaagcaacctacatatctatagacagttgaatagataagcaaaatgtggtctatacatgcaatgaagcatcgctcagccttcatgaaggaaggaaattctgacccgacgtacaccacagatgaaccttgaagatattatgctaagtgaaataagtcggtcacaaaaagacaaatattgtatgattcctcctatatgaggttcctaaagtagtcaaattcataaagacagaaagtagagtggttgccaagggctagagggagagggaatgggaagtttgtgtttaatgaatacaaagtttcagttggggaaaacaaagttctggaggtagatggtggtgatggttgcatgtgaatatacttaatgccaccgaattatatgcttaaaaatggttaaaatggcaaattttatgttatatatgtattttaccatacacacgcacaaaagattccagagccactatcctaattttttcaccttgttgtccatgtccttaagccaagggtcatgggtgttcctgggatctgcaagaatgcaaagagctgagaagacaggggcgcattgggcacctgcagatcctgtaggtaaaaatagcaggagcctaggcaacacaaatacttgttgcctgcaggcaggcagcaaaagaacaaaaacaggccataaactagcagatagtatagcataatgattacaatattgggctctgaagccaaagtgaatctgaacacccaagttcagattctagctctgccatttattagctatgtgaagaaactgcaaccaaaaggagataaatgacttgtccaacagggtccaaagtattttctcatttatattgtttaaaaatctttacatgggttttgtttcattctatatccccagtagactgtaagctccccaaggaagctatgtttgtaatatcctcacttgaaatgtaacttaacttctttgtgcttcagttgcctcacctgtgggatgcagagaataagggctcctacttcataaggttgtcaagcatattaatgaatttatacctataaatgtttaggagaaagcttagtgcttatgatagtctcaacaagcaatagattgagagaggcttctgaagaggtggtcaggctatttcataaaatgttttgagcaagaaaaacagtcctaaaacatccaggattgttctagatttggactagagtgaagaaaaagcaaatcaattgttctttgataatttgatttgtatttattggacttctactttcatgtgtgtccaaacaggctcaagctctgcagtgataagactgacagtgaatacttcaatgatgtctttaagaaaaacaataataaaacaggggaaaaaagaaagaacaaaaccatctagaaagtgtcaacattttactgtctgcagggttcgtcacaacagtgccaaatgacaaacttaccacatttagttggatgaattttgccctgcagaaggatatcaccttttttttttataggcaaacagtttatttattcatcctccttctcttcctccccatcttcttcatcttcttcttccatcttttcccaggcaactttagcaggaccttttgtgccgtccaactttcctttcgacttatagtcagcaacatccttctcatacttcttcagctttgccaccttagtgacataaggctgcttttcactgtcatttaagttattccacatctcacccagcttttttgccacgtctccaatagagatgccagggtttgtggatttgatcttggggcagaattctgaacagaacaggaagaatccagacagtggccttttgggggcattaggatcgttcttgcctcccttagctggtccataatccttcatttctctatcacagtgcactttatccgcctttgccatttaatcgaatttagactctctctctctttttttttttctgagatggagttttgctcttattgcccaggctggagtgcagtggcacgatctcagctcaccgcaacctctgcctcctgggttcaagccattctcctgcctcagcctccccagtagctgggattacaggcgcccaccaacacgcccggctagttttttgtatttttagtagagacgaggtttcaccatgttggccaggctggtctcaaactccttacctcaggtgatccacccaactcaccctcccaaagtgctgagattacaggcgtaagccgccgtgcccagcctagacttctctttcccagacattgtcttccacctctcagagcactttttggaaaattctgcaaaattgacagggacctctggatttttcttatgctcttctctgcacgtctgcacaaagaaggcaaaagcagacatcttgccccttagtttcctggggtcacttctagccatcctgactgtattgttcactagtcttgaaggatatcacttttaagtggacaccattcacatgacattataatttgcaaatttattatgataatttaccagtagatggcagtaaaatgccttgttatttcagaatctgttcgttgtaacaattttcagatatatggaaataaaatgccttgaggagggggtcacttgtgctttgcataaagacatgctatggcgaggcgcagtggctcatgcctgtaatcccagcactttcggaggtggaggtaggtggattgtgtcagcccaggaattagggaccagccagggcaacatggcaaaaccccgtctctacaaaaaaatacagaaattagccaatcgtggtggtgcatcatgcctgtagtcccagctccatgggaagctgagatgggaggatcacttgagcctgggaagcagaggttgcagtgagctgagactgcaccactgcactccagcctggatgacagagtgagactctatctcaaaaaaaaaaaaaaaaaagcggtggtggggtgggggcttactatgggcaagccatggcttgctcttcaggaaaaaaatcattgaaaaaatagaagaaatagactaataattacacaattttaaaaagtggaagaatatcaagtgaccatacatacacaaaaaggtgggggtgggggagaaaaaaaaaactgttttcaaaaatattctgaaattttaaagctttttattagagtataatataaagacataaaagtacagaaatcgtaagtgtaaagcctgttgaatttccacaaagccaacacacatgtctaacaaacacccaaatcaagaaatagaacattcagccccacagaagccccttccagtcattacccacagcccccaaggttaaacagtattttaacttctaactccatagattagtctcaccaggagttaaacttacagattcatctacattgttgcatgtagttgtagcatgttcattttcattgctgggtagcatttcattatttattttttatttttttgagacagagtcttgctctgtcacccaggttggagtgcagtggtgggatcacaggtcactgcagccttgacctcccaggctcaagtaatccttctgcctcagcctccctagtagctaggaccacaggtgcatgccactacaccatgctaatttttgtattttttgtagagacggggtttcaccatgttgcccaggttggtctcaaactcctgggctcaagtgatcctcccacctctgccacccagagtgctgggattacagatgtgagccaccacacctggccagcattttattgtttgaatacaccataatttatccattctactgttaatgagcatgtgggtttccacttaggagctattttattttattttatttattttttttagagatggactcttgctctgtcacccaggctggggtgcagtagtgcgatctcggctcactgcaaccttcgcatccctggttcaagcaattctctggcctcagcctcccgagtagctaggactacaggtgcacgccaccatgcccggttaatttcttttgtattttttagtagagacagggtttcactgtgttgcccaggctggtctcgaactcctgagctcaggcaatctgcctgcctcggcctcccaaagtgctaggattacaggcgtgagccatcacgcctggccagagctttttttgttttgttttgagacagagtttcgctcttgttgcccaggctggaatgcaatggcgtgatctcggctcactgcaacctctacctcctgggttcaaacgattctcctacctcagcctcctgagtagctgggatcacaggtgcccaccaccatgcccggctaattttttatatttttagtagagacagggtttctccatggtggtcaggctggtctcaaactcccgacctcaagtgatccgcccacctcggcctcccaaagtgctgggattacaggcgtgagccaccgcacccgggccggagttattttaaattttactactatgaacattcttgtgcatgtctttggatgaacatgtgtacaattttttgctggataaaaacctaggactaggattgctgggtcatagagtttgcattcagctcttagctcatattaccaaatcctatgtctttttaaaacagttttattgacaggctgggcacggtggctcatgcttgtaattcaagcacctttggaggctgaggcgggtggatcacctgaggtcaggagtttgagaccagcctggccaacatggtgaaaccccatctctactaaaaatacaaaaattagctgggcgtggtggcgggtgcctataatcccagctactcgggagattgagggaggagaattgcttgaacctgggaggtggaggtaacagttagcagagatcccgccattccattccagcctgggtgacaagagtgaaactctgtctcaaaacaaaaatcaaaaacaaacaaaaaacaattttccaaaacaaaacaaaaaaacagcttttgagatataattgacatactatacaatttactcatttaaagtgtattattcagccgggtgtgtggctcaagcctatgatcccagcactttgggaggttgaatcggttcgctcacatatgtccaggagttcgagaccaggctgggtgacatggtgaaaccccatttctacccaaaatacaaaaattagccggacgtggtgctttatacctgcagtcccagctattgtggagactgaggtgggaggatcacttgagcccaggaggcggagtttgcagtgagccaagactgcactattgtgctccagcctgggctacaaagccagaccctgtctcaaaaaaaaaaaaaaaaaaagtataattctatggtatttagtgtagtcacagatatgtgcaaccatcaccacagtcaattttagaacattttcattgcctcagaagaaactctataatctttaggtatctccctctccccaacccccccattccctcagccctaaggaatcactaattgactttgtctctgtcagtttgcctattatggatacttcatataaatggaatcatacaatatgtgaccttttggcttctctcacttggcacaatgttttcaaggttcatccatattgtagcatgtatcagtatcagtactttattctttttcatagctgaataacataatatgtattattatgtgaatataccacattttgttatctttttgtctgttgatggacatttgggttgttttttaccttttggtattgtgaatagtgatgctatgaacattcatgtacaagtttttctttgaacacctgttttcagtgatttggggtttatgcctgggaatggtattgctgggtcgtatggtaatttggtttgtcttattaaagaaatgccaaactgttttccatagctgctgtaccattttacatttccaccaacaacgtatgaagattccactttttcacatcctgagcaacatttgttatttcctttttaaaaaattattgttgtgggcgcacagtggctcacacctgtaatcccaacactttgggaggctgaggcaggaggattgcttgaggccaggagtttgagaccaacctgagccacatagtaagactccatctctatttaaataaaagataaaaaataacatttaagtaaataaacaaataaaaataatatttatggccagtctaattgttgtgaagtggtatctcatggtgattttgacctgttttaatctacatttccctagtgattatgatattcagcatcttatcatagacttatctttgaagaaatgtctgttgaagcccaggcacagtgacttacacctgtaatcccagcactttgggaggccaagatgggaggattgcttgagtccaagagttccagaccagcctaggctgcatggcaaaaccccatctctacaaaaaatacaaaaattagctgggtgtggtgacatgcacctgtagtcccagctactcagggggctgaggtgggagaatctcttgagcctgggaggtggaggttgcagtgagccgagatggtgccactgcactccatcctgggtgacagagtgagactctgtctcagaaaaaaaaaaaaagtgtcctttttgttttgttttgttttgaggcagggtttcactcctgtcacccaggctggagtacaatggcacgatctcaactcagtgcagcctcgatctcctgggttcaagggatcttcctgcctcagcctccccagtagctgggactacaggcacgtgccacagcacccagctaattttttatatttttggtatatacagggtttcaccattttgcccaggcttgtcttgaactcctggactcaagcgatctgcccaccttggcctcctaaagtattgggattacaggcatgagccactgaaccctgccaagaaatgtctattgaagtcctttgcccatattttaattgagttgtttgtctttatgttgttgaagtgtttttaatatattctgggtactatataaagtactcagatcagatataagattgcaaatacttttcacattttttggactgtcttttcactcaagattgtccttttatgtacaaaactttttaatttcaatgacatccaattatctatgtttgcttttgttgctgtgctttcggtgccacatctaagaaaccatttgccaaatccaaggtatgaggatttacccctatgtttccttctaagagttttatagttttagctcttatatttgtgtctttgatccattttgagttactttttgtatgtggtgtgaggcaaggttcaaacttcattttgtgtatgtgaatatgttaaagagaatattccttcttcattgaatgatcttggcaccctagttgagatcaattggccatagatatattgatttatttctggactatcaattatgttccattgatatgtttatccttatacctaccacactgttttgattactttgtagtaagttttaaaatcgggaaatgtgtgtcctccaacattgttctttttcaagattgttttggctattctgagtcccttgcaattaattccatatgaattttaggatcatccatattcatttctgcaataaagtgctgctggaatttccatacagattgcattgaatctgtagatcaattgggaagtattgtcatcttaacaaaattaaatctttcgattcataaacacagaatgtctttacatttatttaggtcttctttcatttctttcgacaatgttttatagttttaatttttatacttcttttataaaatttattcctaagtattttattctttctgatgcttcagtaaatggaattgttttctttcttttttctttttcttttctttttttttttttaagggtctcactctatcacctaggctggagtgcagcggcgccatcaatccaccttctggcctcaagctattctcccacctcagcctcccgaggagctgggactataggcacacaccaccactgtcagttaatttttgtagagacaaagtttcaccatgttgcccaggctggtctccaactcctaggctccagcaatcctccagcctcagtctcccaaagtgttgcaattccaggtgggagccactgtgcctggccagaattgttttcttaatttcatttacaggttgtttattgcaagtgtacagaaactttatactgatcttgtattagcaatcttgctgaactcctttgttagctgtcattgttttcattgatttcttaggattttttgtatacaagatcatgccatctgcaaataaaaatagttttactttttactttccaatctggaggccttttacttctgtatcttgcctaattgccctgactagaacatccaatacaatattgaatagaagtagcaagaatgggtatgctctaatcttagtgggaaagcatccaatctttaactattaagtatgatgttaactgagggttttttatatttgccttttatcatgttgaagaagttcccttctattcctggtttgctgagtgttttttgtttgtttgttatcatgaaggggtggtaggattttgtcagatgccttttctgcatctattgagatgatcatgtgttgttttttattctaccaaaaaaatataatgcaatacttgatttttgaaagtaaaccaagcttgaattcctggaatgtatcccactgaggcagtgtatacttctttttatatgttgttggctagtattttgttgagtatgttacatccatgttcataaaagaatattggtctgtagttttcttattaggtcttattttgttggattttaatttcaaggtaaaactagcctcacagaataaactagaaagcgtttcttcctcttctatttattgaaagctttttttatagaattggtattaatttttttcaatgttttgtagaaatcactagtgaggccgtctgagacctgggcttttctttgtaagtagtttgctttttagtatatattactaatctctttatttgttatgtatctcctcagattgtctatttcttcttgagtcagttttggtatgtgtctttctaggaaattttatgtttcatctaagttatctgatttattaacatacagttgttcatagtatttctttgtgatccttttttatttctgtaagattgtaagtactgtcccatctttaatttctgattctagtaatttcgagtcttctttttttcttgatcaatctgggacaggtttgtcaattttgttgattttttcaaagagccaggatttggttttattgattttctctattgtttttctattctctatttcactaatctctgctccaatctacccagtttatgatattttggtatggcagcccaaatgaactaagacactctgtcacttgaaagacagcctgggagagtaggtatgactacaggcatggctcaggcacctaaagatatcagggcaaggatcacccaaacatccatcaaaaggaaactggttaaacccttcagtgaactacgatgcattattataaataatgaagtggatccatatatattaacaggggaaaatgcccacgctctattggtaagttaaaaaaaaaaggaagttgtagacagtgtgaaaatatagtcccatttttactttttaaacagaatatatgttagtgtacagaaaaaagttggaggaatgtgtattaaattattgacaatgagatttttggagggtttggattttgaaggggtggattacagatatacattatatatctataaagtatttgatatttgaaaaactgttatatctgcaatccaataaaataatttaaaaatttttaaagaagtggccaggcacagtggctgaagcctgtaatcccagcactttgggaggccaaggcaggagaatcacttgaggccaggagttcaagatcagcctgggcaacatagtgagactcttgtttctacaaaaaaatgaaaaattagccaggtgtggtggtatgcgcctgtagtcccagctacttgggagtccgaggcaggaggattgcttgaccaggaaagttgaggctacagtgaacagggattgcaacactgcactccagcctggatggcagagtaagaccctatctctaaaaaaaaagataaagaaacgaaggggagggaagggaagggaaagaaggggaaagaaagggagggaaggaaggaagaaagagaaagaaggaaagcaaaagagagacagtgagacagaggggaagggaaggggaggggaaggagaggggaaggagagagcaaggagaggggagaggaggggaggagagggaagggaagggaaacatagtctatggagtcgaacagatggcttttgaatcatggatctgtgaaaggaggggaaggaagggagaaaagaagaaaagagaaaggtaggaaggaaggaaaggaaaagaaaaagaaagaaagaaagagacatagtctatggagtcaaacagattgcttttgaattatgcatctgccaactaccagctgggtgatctctggtaagttgcttcgggtctctcaattttctcatcaataaaatgggggaattaataccagcctcataagaatgagctacctatctcaccagtttcatctcatctcatcatcccctcggggtgctctagtgtaggggtcagcacactactgcccttatagcagtaagggtctggtttttgtttgtttgtttgtttgttcttgagacggagtctcgctctgtcacccaggctggagtgcagtggcgcaatctcggctcactgcaagctccgcctcccgggttcacgccattctcctgcctcagcctcccgaatagctgggactacaggcgcccgccgccacgcccggctaaatttttgtacttttagtagagacagggtttcactgtgttagccaggatggtctcgatctcctgacctcgtgatccgcccgcctcgtgcctcccaaagtgctgggattacaggcgtgaaggggtctgttttcagaaaataaagttctggcggggcgcggtggctcacgcctgtagtcccagcattttgggaggccgaggtgggcggatcacgaggtcagaatatgaagaccatcctggctacacggtgaaaccctgtctctattaaaaaaaaatacaaaaaaaaaaattagctgggcgtggtgggctcctgtagtcccagctactcgggaggctgaggcaggagaatggcgtgaacctgggaggcggagcttgcagtgagctccacttgcaggcagagcttgcagatcgcgccactgcactccagcctgggcaacagagcgagactctgtctcaaaaaaaaaaaaaaaaaaaaaaagaaaagaaagttctattggaacacatccacagccatcaggatgttgtcttacacattgtctatggctgcttttgcacttcagcaacaaagttgagtaattactacaggaaccatatgacctacaaaatctgaaatatttactctctggtcctttgtaggaaaactctgccaacccctgctctaggaagaatatataggccttctttcacctcctaaaacatgacacattccttctcaccacaatacctttgaacatactgttccctttgcctagaatgacattcccacatcccatatctaatcctttcctgtcaatcctattcattctcatgaccttctcagggaagcttttgcggatcctcaaactagattaactttcttgatatacattctcttagtatccctcatagagtttattgtgatggcaattacccgaattatctgtgctcttatttctttaacatttgactgccccgatagactgcaaacccattaaaaagtctgtcttggctaggcgcggtggctcatgcctgtaatcccagcactttgggaggctgaggtgggcggatcacctgaggtcgggagttcaagaccagcctgaccaatatggagaaaccctgtctctactaaaaatacaaaattagccaggtgtggtggtgcacgcctgtaatcccagctactcaggaagctgaggcaggagaatcgcttgaactggggaggtggaggttgcggtgagctgagatcacgtcattgcactccagcctgggtgacaagagcaaaactgtctcaaaaaaaaaaaaaaaagaaaagaaaagcctgtcttgttcagtgctgaatctctagtgcctaacaaagtacctggaatgtaatggatagaagaatgtatgcatgaatgatattatctataaaaggtatttattgtctgatatatactatatgacgtatactttataacaaagagttcaactaataggtgtggaattggttaagagcacaaattccagagttggacatgctgagatgaaccccagttcttccatttaatagatgaagaaccttagacaagtcccttaacctcttttggcctgtttcccatctgtaaaatggcaataatattagtacctacttcatgaggcttgtaataaagattagatgctatatattatagttattggtgttatgaattattattattggtgcatgtcttagctggacagatattattatgagtccttcaacgttgactccaggttactcttgaatcggttactgggacagggtgagccgaggtctcctctcccactcccactctcaacccagttaaatataaattaaaccagagccatggttaagcaacattctttctttaatttccctttgcaaatggaagcccctgagctggtgcccacccccacccctaccccataccctggggacccccgatgcaaggcccccacctcaacctggtgggaaaagaggagcaccccctccctatgatggtccattaaaaaattcctagtcatttaagaaatgaggctgggaatgggagaaaggaactggaagacaaggcccaggtcaggccagtctgaagatgttggggttgtgagacccttgagaagggtttgcaagcacatccctaagctcggggccagcatggctgaaggaggagaggtgacacacagacagatagtctgattcctcaaggtcctgcctgcctggctgtactgtagatgctgacactcaccaccaccaccaccaccaccaccaccaccaccaccaccacaggcctcctgatggagaattttccagttactctgggattgggtttgctaagcatcccctctggcccctgatctggggcatccctggggtccccctgagaccaaacctgggagaaggagggactctgggaacatgcaaagtgggggagcagagaccccgccccaccccgctgctctacaggatggtggctccagctgcatctgggctccgagggtccttaacagcgatgatgaagttgttggtccttcggctgccatggacccaggataagacatctactttctccacgtggtgacccctggcttccaggaactcaatctcttcctctgtgaactcacctgaaaaccatccccgacatatacacattcagaatgtacagagcactagttcaagagtcctacagtcagacctgagtcctcatcctggctgctccaccacagagctgtatgaccttggacaaatcactttaccttgctgagcctcagtttcctcatgcataaatagggattatatgagaacatgaagttgcagggactaaaggagataatgcacacacagcactgaaccttgcatacagtaagtgatcaataatatgcagtcattcttaatattgaaaacaggacaggccgggtgcagtggctcatgcctgtaatcccagcactttgggaggctaaggtgggaggatcacttgagcccaggagtttgagactagcttgggcaatatagggagaccccatctctacagaaaatttaaaaattagctgagcgtggtggtacatgcctgtagtcccagatactcaggaggctaaggtaggaggatcgcttgaccctgggaggcacaagttgcagtaaagtaagctgagattgcaccactgcactccagtctgggcaaaagagcaaaaccctgtctccaaaaaaagaaaagaaagaaaatggaaggaaggaagggagggagggagggaggcagaaaaaagaaaaaggggctttgtgggtcttcatctccacctgccaaagtcaagctgccatcattacttgccaggatttctgcataatccactaactggtctccctgcttccagccctcccttccttccttccttactggtctccctgcttccagccctccctccctccctcccttcctttctttctttctttcttttttttgaggcggagtctcactcttgttgcccaggctggagtgcaatggcacgattttggctcacctcaacctctgcctcccaggttcaagcgattctcctgcctcagcctccccagtagctgggataacaggcttgcgccaccacacccggctaattttctattttttttttttgtagaggtgggggtttatccatgttggtcaggctggtctcgaactcctgacctcaggtgatctgcccacctcagcctcccaaagtgctaggattacaggcgtgagccaccgcgcctggccccctgcctttcttatagcctgttcaaacagcagccaaggggatccttttaaaccattagtcagaccttgtcacctcccctgctcaaagccctccaacagcttcaacggaatttagaataaaatccaaagtccttaccaaggtgcctctaagcccaacattgcttgggaccttgctacttctctaaattcctcccctcatttccttctatttctcaccttgcttaactgtattccagccacattgacctccttgctgtccctttagaaggccaaacatgtttctacttcagtgcctttgcacttactgttctttctgcctggaatgctctcctagaaagtcacactgctggcccccttactgctatccagtctttggcacctcttcaagaatttcctccaccattacctaaaacagcagtccctaccatctttaccttgtttggttttcttccaaagtacttactgctacctgtatttgtttatttatttactgtgtctccctccactagattataagctttttgaagttaggaacgttgtcttgtttgctattgatctccagtgacagggtcagtacatagtaaatattgagcagatacttactacatagatgaacaaatccccatcccattggataagttcagaccctcatcatctcttgcctgggccatatcccagctgcttctcatatttccctgacttaaattctcctcccctcaatctacctcccctaaataagacaaatcaggtcatgtgtctccccttcccaactggataatcttaaggctgacctctgtgagaagccctgtaactccacatcctaccgcttctcaataaagatctagtcttcttctttccctaataggaagacttttggtagctcttgagatgaagacccaatcttgaatagcattaaatcacttaatcgaaaatctatttcctttgtggttcactttcaatccttttgattatggcaaggaacaagtttcagtctgctctctaacgcttcctaatctccttctttaatggagaaagcagtctcagagccttccatgggcaacaatatttaactaaaaactacacatatctatttgtatagctaacaaatagatgatagctatttgtcatctatttgtggcaaatgatgtcatttttccatttgtgattatgatataaggtctatttttaaaatacatttagggccgggcatggtggctcacgcctgtaaatccagcacttcgggaggccgaggcaggcggattacttgaggtcaggagtttgagactagcctggccagcatggtgaaaccctgtctctacaaaaatgcaaaaattagctgggtgtggtggcatgtgcacctgtattctcagctactcgggaggctgaggcacgagaatcacttgaacccaggaggtggaggttgaagtgagctgagatcgcaccactgcactccagcctgggtgacagagtgagactctatctcaaaaaaataataaaatacatttaggctaaaaaggaagttcatttagagagacatgttatgtacatattggtttagatggtgtgcaaatgtggcaaaagtcacaaaggtgctgggtaaattgagaactctaggaaacaacagctagcctcctggctgctctctgagccattcattctggtttttgcctaggctgttcctcctgtccagaatgtcctttacctccacataccaaattcctactcatacttcaaagccaagctacttgtcacctcctccataaagcctccccagggcctcaggtagatgaactttcccttcaccaagcccccactccttgtacctccatcttacactaaggccctgaaggcaggactgggctgagcccaaataacttagcacagagcctcacattcaacagagaccagcagatatttgttgaacaaaattcaatttcaaggatgtggccttgtcatctatcagctgggatccaagtgtcgctggccaaccacaggatgtgattgttgaagatcgcggtctctgcttctaatgtgattcagtccaggagatatcaagagctgtgcagtaaagaatagagtctttggtatcagccaggtgtgtgtcctaattgaagttctgccacttagtggttgatctttgactagtttataacttctgtgagcctcagtttcttcctctatagaatggggataataatattgaacaggcaaggactgtgtctcaatcaattctgtattcttttggactcgtgtcatattaatacattgtctgttataataaaaactcctcaaaggtgcagatactttcctgtttataaaattcagctgtgccaaaattaagcccttttcttagaggaaagtccgtctcctcaccctaaggtccacgatccggcgcctgcctgcctctctgatctaatttcatccttgcttaccttggtctcctttttagtcctcaaactcaccaaacccactcctgccctgagttctttgtacttgctcccctgacctacaaagctctgcaccaattctttgtatagtgggctctctcttactttttttttttttttttaggagataggatctcactctgttacccaggctgtagggcagtggcgtgatcttggctcactgtaacctctgcctccctggttcaagcaattctcctgcctcagcctcccgagtagctagaaccacaggcacgtgccatgcctggctaatttaaaaaaatttttttatagagacgggggggtggaggggggtctcactatgttactgaggctgctcttgaactcttggcctcaagcgatcctctcacctcagcctgggattataggtctgagccattgcacccagtttctttctcactctttagatctcagcttaaatgccaccaaagagaagtcttccttgatcattgagtccgtcctattatatcaccctgctttgacagttggcagagcatttatttgtctcatatttctttgatgacttattttcttgtttgcctgtaaatgcagaatccccagcacctaggatgatgcctggaacacgtacgtgttcaatacaaactgttgagtaaatgaaagtttgaagaatgaacaactgtgtcttattttacaaatgagaaaactgaggctcagagttgagacatggatttcccaaggccacacaaccaggaaatggcaagactggttccaatccccagatcgttcactgctccaatagaaatttgccaaataaaaccaaacttcactggcagttggtgctggttgaggcatgggcacccttgggaggagtcctttctctacctgtccctgtgcccgccccacgaggtctctgctctgcactcactgtccacctgcaggaggttggactgcaggtccgggtgtaggcggccgcgggccaggctgtcactcaggttccggttcaaggtcaggacattcagcagaacctgtggtagccaaggtacagaaaaatcagggctgtcccaggggtgatggtccaggattcctcagctctcacccttggtccaggctccttagtcttgagaattcttacaccgggtgtcatctgagcctcctaacagccctggaagacaggcaggcctgtgatgactgtttccatttcacagagagggaaagtgaagtccagcaaggaaaatgacttactccagagtttagaggaagccagggaagatacaccactagaaccaagtctctttaatctagcccggggctcccttcttttctctctggatagggcaaggttaatagctaggagtggtctagggcacaatgtgggtgcttttaacttagtggttaggagtgtgcgtaggctctggaaccaaactgcctccctgctctttctagctgaaggtacttgacctaaagtcttaacctctctgggcttcggtttccttatctataaaatagaaataaggattctctccagaactgggaaggttaaaatggttaacacacataacacagtgcccagcacttagtacgaactctttaaatgttagctattgttattatttccattttaaagatgaagagactgaggttcagagctgttaagtgaatgctccagcatcacacagttacaaattggtagcacttgggccggaacccaggagtgtctgattccagaacttaagatcgttaactcaccacctgccaaaataggtgcctggcatatatatcaggttctcaagacattcatggagccattctgaggtgttctggagaaaagcaggcccttcctttcaaatcccaccctaaagagggctggttgtctattcagatgctgggtagaggtataatgggacttgaggttaacagaacccaggccacccagatgctaaccccacttttcaatctactgaccctgccatttcccctgcaaccgggaaagacagggagcatcagggctccattttcactaagaaactcagcgcagcccatgtccacattgcccaggatgcgcctggcacaaaacagcctcagcccatgtttgccgcatgaggaatggaaacaagccacagatatgacaggcatctgcagtctaggccacagcttggctcccggctgaaaaaggccaaccatggcgtaaacctcacctgtgtcaggccgctgaggccccgcgcagctccattggcccccagagcgaggtaggttccacagagcccctccgcgggtcggaccactgtgggcagcaggaaagagagtggccgcttccctggctgcactgaattctcctgttgttagaggacagagaccacaaggggcaggtggggtgggacaagaccgggaaagggcccctccacaacccttccaactgctctccctcttctacatcttccacaggcccagttttcctgggagactggtcccttcccagacaacagtttgctatctgtgaaatgggtagggtgcctggatgggtggggtggatgggggagtgataagtacatccactgagctatgaggctgctacgggtcacaggagaaaggaccaagccaagaaagatggcaatggggaagaacaggataaccccaccctgatcatctctatgtgtctttgccctgctggggccccagatggcggggtgtaagagtgctgatttttaactagataaaaattattaaatccttcctccttgggtccctctttggtgcccaaccatagggctgagccccatcagctcaagctcacatagtcacagaccgctagtgctggaaaatgcccaaaacatcaaataggagccaaaaccctcattgtacaggtgaagaaattgcccagagagggcaagatcttcacaaggtcacacagtaagacagtgacagaatgggacaagggttcttcagacccaccaggctccatgtcccagacttagcagggctagggatgaggtgaacctcttctttaggcttccttatactagaagattctggagaaagtagggagaaaggggcagccatgccattgcacctcctacctataggcctcagggtccccaggaaagcagggaagcaaatcctaccaggctgggtgcagagtggttagctgtccggttgggccaggagaagtccagcatctggctgttgagcaggatccccgagggggtgataaggccgctgccaaagggctggttcagggagctgggggccgaggtggggttgggtgagccctggcccatcctcacctctacccagcccccaccccctcttggttcagaggatcccttgttccaggttctgagtctgagctggcatacctaaccatggccacaatgaagtcatcaggtcccatgatcagcacctgggcagccgtgggagctccgtctagttcatagacaggcaggagtggggcaggggctgcctgggagtcattgatatggccccggaggtaggcggcctccaccttgctgaaaagacaaggggtgggagatgagcaaacaacaggctctcaatacaccccacctacctcacttttgtggtgtttgtgtaattatttgatgaaatctacctccctcactggactactaggtctatgagtgcagaagctcattaattgcacataagaaatacccagaaaatagctgttgaatgtatttaggtattatttagattcttttctggaaccaacttttatttaatgtttaaatcaagagccttttagttatctgacttcttaatcctttctatgaaagtgcctggtgcataatggatcagaaaatatttgctttgaattaacaaactggattcatttaaactaatgtttgtagtctaaagttttattaagagtttagttgggggaggattttgtatatgaggattttttttttcttcctaatgagatagagtttttctctgtcacacaggctggagtgcagtgacgctgtctcagctcactgcaacctctgcctcccaggttcaagtgattctcctgcctcagcctcccgattatctgggattacaggcacctgccaccacacctagctaattttttttagtagagacggggtttcaccatgttggccaggccggtcttgaactcctgacctcaaatgatccactcacctcggcctcccaaagtgctgggattacaggcatgagccaccacatccagtcaggatctttactttcttttagagttttttcccaaggcacagagtaagtgctcaataactatttactggatgaactggttgaatagatttcatataggtgtgtgtgtgtgtgtgtgtgtgtgtgtgtgtgtgtgtgtgttttagagcaaagtttgcattgaccttagaaacaatatgtaatgctccagacttttaaaaattcaactgaggcgggaggctgaagcaggagaattgcttgaacctgggaggcagaggttacagtgagccaagatcatgacactgcactccagcctgggcgacagagcgagactccatctcaaaaaaaaaaaaaaaaaattcaactgagggtttcttacctaataactatgtgttggattatccatagctgattagagaataagttaccaaagattacttgaagacatttattcaattttcaaccaaacaaagctttacatgtatgattttgtttagtccttaccacaaccttacaaggttgataccattattgtcaagcccccttgtagaaacagatttagagagtttaaaccacttgcccaaggctgcacagctagcgaagggtcaagctggaatttgaatgaaggcagtctcaccagagcccacaagctactactatgttatgttgctaatgaagctgtattaccaccaccttcagtatttgcttggagactgtttgtttgtttgtttttggagacaaagtctcactctgtcacccaggctggagtgcagtggcatgatctcggctcactgcaacctctgcttcccgggttcaagtgattctcctgcctcagcctcctgactagctgggactacaggcacgcgccaccacgcccggctaatttttgtatttttagtagaggcagggtttcactatgttggtcaggctggtctcaaactcttgacctcaggtgatccacccgccttggcctcccaaagtactgggattacaggcgtgagccaccgtgcctggcttttgtttggtattgagctttcttttcctactcaaaaggaggagcagatgggcttatataggtgctatgctagcctcaaaaaaatttaagagccacatgaagtaagccaactcattgtgctgataggaaaggtgaggtgcagggagaggcacccagtgtcacgttgtgagttggggttgagctgaaattgacttaggatttcaggcctttattgctataccagctgcttttctcctgaccctttccccacacccaccgctgcctctgtagcccccaggtcctgcccaagacccacctgagcatgtcatccatgctctcagtgatggtagaatcatagacgggatctcccagtctgctggccagggctaatgcaatcttcagggtctgaaaatacagcagggatatggaagaggctgccaggcccctcccagaacccacacccagtggactttcgtgtgtgagaaaacttggaggggatttagtcctgccctatggcagtacccaatctccccactcctaatatccttaaatccagggaaaggcagacgggtcagccttacctctgccacccagtgaagagcctgttctcgggataccaggctggtgagattgaagccctccaggatgttgagagcactgatgagggcagggcccgtgtgcggaggtgggggactaagaaccaggtggcctgaaaggacaggaagtgactgatggcagggtaggggtcaaggcaccttcacatcccacatcccatctccacattccaccatcacacactgagaccactgcgctgaactccctcaccagatggggaaactgaaacattgagaggcaaagagactcattcaagttcacatggcaagtcaagggcagggccaggacttgaactcagaacactggtcttcagtttcctctgccatttgagaaaactaaggctcaagagggctgtggcttgcccagagtcacactgcaggctatcagcagagcacagcagaaacaggtgaccagatgttcatattcctggcctgtcatgtgtctccttttagctctcccataggccaggatattatccatgactcctgatggtctcatccagccccaaacttcttggcagcagcaaccttctcttcctattctgttactagatgtttggacatcaaaggaataatagctgatgcataacactaacattaactcatttagtcctcactgtggctactgttatcacacatatttgataggtccagaaactgtggtacagagagacaaggggaatccagagcactcaaggtactagcattgttgagacaacccaggctgggaaggggaaatggaaaatctatattcagtgcatgctctgatcagggcaacttcctacatcatctcatcaaatccttatgggcatcctaagatgtaggcactattattatttccattttaaggagggaaccaaggctcagagtgggaagtagcttgttcaaggtaaatggcacagttggtactcaaacccaggtcttcctagctccaacgctacgcttgttcttttttcttttctgtgtgtgtgtgtgtgtgtgtgtgtgataatggtctcactctgtcacccaggctgtagtgcagtggcacaatcatgcttactgcagccttgacctcccaggctcaagcaatcctcccatctcaacctcctgagtagctaggactataggtacaccaccacgcctgggtaatttttaaattttttatagagacggtgtctcactatgttgcccaggctggtcatgaactcctgggctcaagtgatcctcctgcctcagcctcccaatgtgctggggttataggcctgagccactgcacccagctgataggctctttccattgcttcatattccactgcctctggcagaggaatcaggttggagattgaggcctggaaagttgaactcagagaaaccctttcctggggcttgatgtgatctggctctcctagaagggaaagaacctgagaatcttctgagaaatccagcacctaccaccttgggttcagtaaacatggaccccacccatgtcataagcttggttttctgggttccctgttggttttcttgagtttggccagttgttatattccctcctcgggcctcaatttctttttggcactatgaggagctgggtctatgactgtcttgaaaggttcattctactgtgaagcttggatggactttgtcttaaaaattcttaggaagtacagggcagtgacagcgctgctggggaaagggcagaggcaacacagagcccaaatcaagaaaacctatggccagaaccccaacttccaggttggaccctttgaccaggtccaccccccaatatcctaaatacttggggtaactgaccccacagctacttttcagaaggtgggctgactctggtttgcttcaacagttgactgcccaggtagctcactgccttagtttctctcctgtgaaatggagaggagtctctaggccaaaacgatgtggccatggactgggaggcttctcctgaggggggaccctgggagccgggggagaggtcacctctgtacacgccacacacaggcttctccacaagggcgctgtaattgctgaagtcctcttcggttatgacaccccctgcgtgctgagcctggagggaagagaatgagggaatgacctcccaccactgtgacatggtggttttggcctataacacgtttggatcacagacagatcagctgtttataacttctgtgccttctgcaacccccatcgtggcctttagagaccccattatccctagacacctcaggaaaaaggaagggggaaaagcactaacattgagcacctatcatgtgccaggcatcacactgggtacattccatgaatgacctccttagcttgccattcaagactttttgtgatctggccccagcctacccctcccacctcatgtcctgctgttccccagtgagctctatgcagctgcagagtgacctgcagttcctgaactcatgccttcgtgtctttgtacctgctgctctctctgcctatgtaaaaggaaggttttctacttatggcacacttgcctaggagataccaaaactgaatgctgcatctcaccacaaccaactaaagccactagaaaaccatgactttgagtgatcctagaaggactgacccttattggacataaccaagccctcattattgaccaatgaaccaatcttgtacaaaccaatgggctcattccatcctatccagtgtgctgtcaaccctaaattagcataaccactctgaatcctttccttttttgtaccttatagtacttgaaacccttgagttatctatcttcagagaattacacattgattttttttttttttttttttgaggcagggtctcattctgtcgcccaggctggaatgcagtggcacgatcatggctcactgtagcctcaaccttcccaggctcagatgatcctcctgcctcagcctcctgagtagctgggactacaggcacatgccaccacacctggctaatgtttgtatgttttgtagagatggggtctcactatgttgcccaggctggtctcaaactcctgagctcaagtgatccacccatcttggcctcccaaagtggggattacaggcatgagccaccatggcctggcccatttgaattcttgagttcctttttctggcaagttaataaactcaactttgggtttctttttatcaaagatctgatggtctttgttacaatctcctgcattccctttgccacctccaggaaagggcacacaacccaggcctggccaattggggcattcccttctgtgccacagtgattgatttgggaatagtcatgaaacctatgatgagctaataagacacaacctggaggcttttgctggaactactgggaaggaaaaatgctctttctctgggatagcttgctggaaggatggcctgatatgggctggtggggagcaggtggaaaggatctgagagtgaatccaaacaaaggaaagtagagttgagagagagagaaagagaaagagggagagcaaatcctaacacagtggattgataatctggacacagaagaatctaaagccagtaatctcctggactttccagttaagtctgtttgagtctatcgccacatccagtgcccagcatagggcttggcacagagcaggcactctgtgaatgttgaatgaataacagacctatttaattcccacaactgtatggcagagacagatataatcatccccattgctcagatgagagaaccactgagttggtctatgcatccttaccatgaacttaattttccattaggacttttgcactattaatgacagttctcacatctgttactgcctgagactgggactctttgggattggatggtaaacttctgtgtcaatctccccagtcttgatactcaacaatgaaagaggtgcttccctcagtccctagaaaacccaaaagcagggaaggattgtgagcttagggaagctgaggccgatactgggtctccaccaggcctgggagggacatgacaagcccctgcacaggctggcatcacccctgagaagcccaaaggtacctctgaatcaagacagaacacttctggctaggcatgggggctcacacctgtaatcccagcactttgggaggccaggacaggtggatctcttgaggtcaggagttcgagaccagcctggccaacatggtgaaacctcatctctactaaaaatacaaaattagctgggtgtggtggtgcacacctgtaatcccagttactcgggaggctgaggcaggagactcacttgaacctgggaggcggaggttgcagtgagccaagatcgcaccactgcactccagccagggtgacacagcaggactccgtctcataaaaaaaaaaaaaagacaacacttccatcatcccaggaggtttttcatgtcatatcccagtcagctcctcccagccccaccaaccactgatctgatttctgtcactagaggttagttttgactattctagaatttcaaatgaacataatccacagtaaataatatagaaagaaagggagggagggagggaaggaaggaaaaaatgcggacgcggatgtcctgcaatagggaccttggggcatgcccccacccgcacaacacgagcacttacctcggccaccatctccagtgtgaggttgccacctgcgtagaaggcagccgggccggaggtgccaagtacatccagcacctcagccaggtcgggccgatgcagcaacgagccaggtagtggcgggcggcccgatggcaggaacgtctcccggaagcgctcggacatgttgggtggcagctgttcagccagggcacgggctaggggcagggacgggaggctgggcagggcgggacgccaggactggaccggatgagacgcgcaatagatggggtagatgggggctgagtggcccaccctaagtgccctgacccccaggagcctgttaagtgcgaggcagggatgtctaagggcccttcccagaccccctcgtttgaggccgcctccaggtgagggtgggataaggtggggagggggtctgaggagcaaactggaagagagggcctctctggcttgggctccaaatctcaaagattctacccttctccatcaacctcatgtctctcccaaatccccaggccccactgacctagatcatgagtcacgttgaagccatcttgggccacagctgctgcaaaggccaggacttgggaccatggcagcctgggggggccggagagcagggggtggaggaggtcctgggggaatgaggaggggtccggggggaggggggttcctgggaaggagagtcctggcaagggaaggggatattaggagggggagttgggaaaggaagaatccagggaagtaggagaaggccacccaaggagagatgcaaacgggggtccctggtccccagggggagggttgttacctgccatagagctggtgagcttcatgtagccccttcaccattccgggaacccccaccaagagcccaggctgggcaaggcgggtaggcgagggagagaggagaccaggtcactggaaggggggtgctgggctgaactccgcagagccccaagccagggatggctggcacaggggagagacacaggccaagtatcccaggggagggacaagctttcccaagcaggcacccctcccatctccctgacttcctatcagcaaatgcagaaaggcctcttttagctgccgtagttgggggatttataaattaagcaaaactcttttaagagccaggacataaccagtgtagaaagacacctgtctacattggatttcaccaacccctgcctttttttttttttttttttttttttcctgttacccaggctggagtacagtggcatagtcatagctcactgtggcctccaactcctgggctcaagtcaagcgatccttggtgcatgctactgtgcctggctaatttcaaagcattttttgtagagacaaagtctcactatgtcactcaggctggtctcaaactcctggcctcaagcaatcctcctgccttggcttcccagagtgttgggattacaggtgtgagccactgtgcccaggcaaccctaccttttaaaacggtggacaaaggaccttcatttaacctattcagtttcaccccaccattactctgagctctgaagactcaggggtgtgtttggcttttgccaccgcactaagtacccatttttccaagttattcgatatcttctttttctttcagcagacagttggtttacttctggcaattcccctctaatcttccaatatatcaagggctgggaaagttatagtcaactggctcagagtgagatgtgtgagtttcattgcatcaacttcgtgacatttcagggtactcagtagccttttttcttccttcccacgtgccagataggtaagattcccagagaagtaaggttccagattttctagttcattattttatcttgggggctgcctgactctctcatagcctaagagaatcctgctcaactctttttcccactcccctggtaaatacttagcaaattaatgcttgggttagcagaagggcaatgaagagagactcccctgaactctctcttctcaccagggtccccaccttggtctcccaggatctttgcagggtctcttccctgagggcccctggtgcggactcccggaaatcaattaggtggctctcatttcgtcggatgtcatgtaccagcatcacgcccccactgggagagacacagaaggggaagtgtgatgataacatgctacccctctgtacaatgaatctgctgcccctccacccccagtggtgagagctgtaggctcagtttttcatttggggtcaggtgtctgagctccctccccagcatggattcacagactcagccaccctaagaggatgggagcaaaaccaagagggttggagacccagggtccatggacctcttctatcctgtcactggagactttaatccctgattaggaaaagcccagagactggcagaacaggatgttctgccccatgcccccaccctggaccagagctggacccctgccagcttcctgcacctgtctacttggtatgtcccttgcccctcccccaggactggattatgtaaggatagaacatgcaaaaccaaaagaggaatttctttggtacggcttggagagctggtcttacaggagccaagataggaactttgtcagcttgttccttttctgtagcttatttacgtctaagatgggggctgcaaacttaaatgcccacagccaaatgacaaactaaggcaagcaggacagagaagaggaagtggtagaaactacggcaaactggacagtgcatgcccatcatgggaagcagcttctattccacgccaggtaacttcagccatgtgagaatgcgggcccaagttgttatcggatttcccgattgttcaagagatgttggaaatctggatttttatgaaaattctcaactttttaacaaaagcaaacaaaattttaagacagttcagtgtctaaaccaaaccagtctgtgtgctgggtgttgcccatgggtggccagcttgtaacttctaagagttcttagtgcagggtgtatttttggaggacagagggtgcaaggcttttcatcagacccatagggatttatgatcctagaagttgaaatatctctgccttaattgatgacagtatacctccacctgtgcatcttaatttatggtttacaaatttctttttctagttaaaaaaaaaaaaaaaaagcttctgaaaacactttcaggttttccataaggtagctttgctcttctgactccatccagggagaagggggtgaaatttggtgtagaaagagaaaatgcaaggagttggggcccaaaagcccctctccctaagttaggagtgctgcacatgaggcctacagacctggaggcaagaagtaggcctgggggaccccgacctccactgctccttacccgcccaggccagaactgtgtggagccacgatacccaaacacaaggctgctgccaccgctgcgtccacagaagatccctgtttactgagcacctcgatgcccagtgaagtgcagcgggcagcatcggtcaccacggcaccctgctggaagatctgggaggggaaagaggacttggtgggggcaggaggagctgtccacctccctagggcacctccactagccctagaactctacgcggcatgaaggtcgaagccctgcccccttgttgccttgactctgccctcattaccccaagtgcctcctaatggatctgtccttattcttccttgttctgtctccctcatgccctggagctcctctctttgggaccttcctctcccaagtcaccaccctctctccccttctaccactcagccattccccagtttccacagttcctcaaacattaccccactccccactccccagtttcctccccctccccatttgtccccctcacctgggggtccccgaagtagatctgcatgaccagcgccacggtgacaccggtagcgaaggtgagacaggccgtgacgatgaccgtgagcccatcctggcggcaggagcactcggccgctgcggcggagaacgggtctttgcgcgtctcgcgtagcggcgacccgtcttggctgcccatctccgacgacgacgatggcagccgctgcagccgtgcagacttcaggaaggagtccgggtctgcgggcaggcagccggggtcggtctgggcatctcctatctggccctgcccaccctccaggtgggactattcagcgctttccctgccccgcccctgccacacaatccccgcactggctagcactactcacctttcctcattttcgcgtgcaccccaggacaggcggggcaacggtgcccggctaggaagagacagggacctccccagctgggcagcagggaggctggattcccgcccctccctgatacctaggccaaatttcctggcacccagggcccagggctgagaacacttcctggggggtggggtgggggttccagccctcagtggaaatcggatcctgccccagttggggcccagccttccatgcaaggaggcagctacataaacagagtggagggaccctgccttccaacctcacttcagttatcagctcactcattccttaaatatggagagccctatgctaggtgccaggggacgggaacagatagttcctgccctcatgtggttcatagagccctggaagaaaaagccaataagcaaaggagtctataattacaagttgtggcaggtgctatgaagaaaaaggaggaaatgacagaataatggtggtaggggagggaggattccttagctgcagaaatcagggaaggcctctcaggaagtgacttttaagctgaaaactaagggatgagaaggagccagctataatgtagagcaaagagtatgtgtgtggaatgttctggaaagagggaacagtggatgcaaaggccctaaagtgggaatgagcttggcacattagaaaaaaaaataaccaaggcctgggcggctctggtgtagcaggcatggggaaagagtagtaagggtggaagctaggccagatacatactgagcgcagtggctcaatcttgtaatcccagcactctggggggccgaggcgggtggatcacttgaggtcaggagtttgagaccagcctggccaacatggtgaaaccccggctccactaaaaatacaaaaattagctgggcatggtgatgtgtgcctctaattccagctacttgggaggctgaggcatgacagtcacttgaacccacaaggtggaggttgcagtgagccgagatcgcgccacagcactccagcctgggtgacagagtgagactctgtctcaaaagaaaaaaaaaaaaaaaggaagatatgtggggctctactagcctggggagaagcttgggttttaccctaaggactatgggaggtcactactcgagaggctatttttgtttgtttttgagatggagtttcgctcttgttgcccaggctggagtgcaatggcacaatcctggctcactgcaccctccgcttcctgggttcaagcgactctcttgcctcagcctctccagtagctgtgattacaggcacatgccaccatgcctgagtaattttgtatttttagtagaaacagggtttcagcatattggccaggctggtctcgaactcctgaccccaggtgatctacctgcctcagcctcccaaagtgctgggattacaggtgtgagccaccgcacccagcccactactagagagttttaagcaagaatgtgaaaccatctgttctgtgtgttattgttgttgtttgagacagggtctggctctgtcaccccagctggagtgcagtggcaccatctcagctcactgaaacctctgcctccctgcaacctctgcctcccaggctcaagccatcctcccacctcagctcagcttcctgagtagttgagactacaggcatgccccactacacctggctaatttttgtattttttgtagagatgggatttcgccatgttgcccaggctggtctcaaactcctgacctcaagtgatccactcacctcagcctcccaaagcgctgggattacaggcatgagccactgcgcccggcctgttttgtgttttaaaatgatccctctggctactgtctggagacaaactggaggacgataagagtggaggtaggagagaactgaaagctcactatttgctggtggctatggacaagtcagtcaagtcatgcacctcaccttcctcattctagtaatggaactaatccctaactggtgggataggggtacaaggattccatgaggtgatgtgcacccagtgcactgtaggtactcactccaagttatttctattccttttccaccttgaccagggctgagaccctcttccatcccatagctccctcctctgagtgttattagctgtgaacccaggtccctaaatggcctaaaggtcctaggtgtttgtgaacagtaaagaaatagtctttactttaccttgacctcatgctgtactcacaatatgttttttaaagtttattcattcaatttttttagtacctgctactatgcactaggactataacccctttaaaagtctatgtgataatattaaaaactgaccattttattgttctgtttaaaatacgtggttcactgatgccaacataataaacatctaagctccttgtggtgtttaaagaccttcatgatccacagtcccatcttttgtgtaaataagaaaccaaatatatagataaaatgatgatatatgcaagaaatgtttataaattattacagaagttactcttgggaaaggatactgaagatgggaatgagatggggtgggagtttttttggtttgaaatttttaccacttatatctatttcctttttagaaatcaatacataaaccgggagtgctcgtgcatgcctgtaagcccagctattcagaaggctgaggcaggagatcacttgagtctagaagttcaaagctgcagtatgattgcaatatgaatagccactgcactccaggctgggcaacatagatagaccctgtctctaaaaaaaattaacacatatattttgaaatgaaaaggaaaaattacagggagataggaatgggaaaggggacttttttattcttcctcactattgctttttttttttttatcatgaacatgtaatttttgtttttgtttttgtttttgagacagagtctcactctgtcgcccaggctggagtgcagtggcgcaatctcggctcactgcaacctccatctcccaggttcaagtgattctcctgcctcagtctcctgagtagctgggattacaggcacatgccaccacgcctagctaattttttatatttttagtagaggcagggtctcaccatgttggccagtctggtcttgaactcctgacctcaggtgatctgcctgcctcagcctcccaaagtgttgggattacaggcataagccaccgcaccctgctgtttttaaactttattttcaaaaaaaggttatcttctgagactctccctcacttcataatgcttgcctctaaccctcaacatcagcatcacagagtctgtaaataaaactggaattcatccaaacaaacagacgttaaacacccactgtaggcacagaactctccttggcccctagaaatgtcttgttgttgttgttgttgttgttgctgttgctgttgttgttaatagagacaaggtcttgctatgttccccaggctgttctcaaactcctgagctcaaacaatcatcccgcctcagcctcccaaagtgttgggattacaggcgtgagccacagcacccggcattagaagtttcaaaagaagtgtgggaaagggttttgaacttatatttattgatgctgactacatattaagcattttacatatattcctttattgaagtgttcccaagactttatgaaataagtcccactctcgccactttacagatgagaaaactaagaccaagaaaggtgatattgcccatctcaggtcataaaatgagtaagtgggccaggtttggtggctcacgtctgtaatctcagcactttgggaggccgaggtgggaggattgtttgagcccaggtattcaagaccagcctgggcaacatagcaagactcctgtctctacaaaaaaatttttttaattagccaggaatggtggtgtgcacctgttgtcccaactactcgaaaggctgaggtaagagcatcacttcagcctggtagttcgaggctgcagtgagccactgcccaccagcctgggcgacagggtgaaaccctatctcaaaaaatttaaagtaaaatataaaataaaataaaatgaataagtggcaggaccaagagtctgtgtaactagaaagcctccttcccattgctccacatggcatcaagagccatttctaccctcagaaaccaaccttacaagctaatttttgttgctatttcttggtacttattgctttgtttttgagagataatcttcctgccaggctggaatgcagtggcgcaatctcggctcactgcaacctccgcctttgggttcaagcatttctcatgcctcagcctcccaagaagctggaattataggcatgcaccaccatgcccagctaatttttgtatttttagtagagatggggcttcaccatgttggccatgaggctggtctcaaactcctggcctcaagcaatccgcccgccttggcctcccaaagtgttggcattacaggcgtgagccactgtgcccggccctaggtatggtttaatttgttttctccagtcagatataaggatccaggaggtaaaggtgacatgtccctatcatagctattcaagactctctactccaccagtccatcataaagttattgatttatacaataaaaatatttactgagtacctactatgtgcactgtggaacagctagggcaataacagtgttgattttactgatagggaagagcaacagcaggatactggaaaaagattaatttgcaaccagaaggaataagtcttttgggagaaagatgacaagttcaattttggttattataaatttgtgggacaccataagaagctgtctggaggcagttggcctagtagatatctaatttttaccttcagggctcatccctggtatctgcttggataccacttctcattcaattttcttttaaggaacattctctctcctctctcagccaactccctcatccctgaccaaagtatataactcagacttggccagtcagaacaggtacctctgtgcagtaacaggcaatgtgaacaaagccaggccaataagacccaaactttgttattttgctggaactactgggaaagagaaaggctcctctttctattacacttaagttgctaagttggtaggatgtaagcctgtagctgctgggggcatcttgcccctaataaaatgggaggccttctgccaatgaagcccaccaaaagaaggcagagcaaaagatggagaaaagtccattcctttttaggtaccttaatccagctatgcctgaaaccccatatccctggacttttcagttatgctacccagtaaaattctctttttggatgtagctcagttaaactgggtttataacaaaataatcctgaacaaaattgattatacaagtccagagtttaggagagtgatcttggctagaggctagggtcatccctggcttgttgtttattcccttaaggggagaatcactaaaataaataaataaataaatatatatatatataaaattttgaaacagtgtctcactctgttgcccaggctggagtacagtggtataatctcagctcactgcagcctcaaccttcagggctcaagccatctgcccacctcagcctcccgagtagctgggactacagacaggcatgcaccaccacacctggctaatttttgtattttttctagagacagggtttcaccatgttgccccggctggttctgaattcctgagctcaagcaatctgcccaccttagcctcccaaaatgctgggattacaggtgtatgccactatgcccggcagaatcaccaaagatgtctgaaccagggagtgacatgaccagaagcgatggatggattggggtggggactgggcaagagggaggaggcaggaggagtagctagaagcctataaataatattgataagagaggttggtggcttagtctacagtggtgatgacagggatgatgagtaggaatttggaagatacttaggaggggtgcagagagcacttgatcaccatttggaaatgagaagaaaaggaggagtccagcatgccattcattattgggagactgggtgactggcagtgtcattaatggagaatggcagtggaggaagagcaggtgcatggggaagggatatgatgagttcaaaatagaacatgctatagatgaggcacttgcaggacatctggagacacaggcctgggagagaaaggaacacaagggcttggagctcagaagaaagaaagtatttcccaaccttggaatgatcactgtctagctctctttcccacagagcctgatgtggggtgcctggcacttgggtttagggaatggcaggctagaggctagctgggcacaaccaaggtcctggctaagaggatggtgctgtgccactagatggtaccaccaggttgagaacacaggaggccatgtcagcctgtagtctggtccaggtgaaccgaggaagccttggggcttggaagtaggattgggagatatggcattcaaatgattacactgaaatgatggcaacacacaaacctgacacataaatttggcataaggtataaactcccagaagctcagatgactaggatctctgctggatttccatacaggggtgagggcagagcctgtattgaacttcccaaaatactccctgaggttttggaacttgctctctcctaccattctttcatcctctctcctaccattctttcatcctgagatcttctctctcatgcatttattcattcaacaattattgagtgcccaataaataaatagagatgagggttttttttgttgttgttgtttgtttgtttttttgagacagagtctcactctgttgcccaggctggagtgcaatggcgcgatcttcgctcactgcaacctctgcctcagcctcctgagtagctggggttacagacacctgccaccaggcctggctaattttttttttttgtatttttagtagagatggggttttgtcatgttggccaggctgtttttgaactcctgacctcaggtgatccacccgcctcagcatcccaaagtgctgggattacaggtgtgagccaccacaccggccagtgtattttgttttgttttttgttttttgtttctttttgagactgagtctcactctgtcacccaggctggagtgcagtggagtgatctcggctcactgtaacctctgcctccccagttcgagtgattctcctgcctcagcctcccgagtagctaggattacaggcacccaccaccatgcccagctaatttttgtatttttagtagagatggggtttcaccatgttggccaggcaggtcttgaactcctgacctcaagtgatccacccacctcaggcatgagccaccgcgcccggcctatggataaggtcttgatgctggagaaaggagagtgaacaaaacaatcatgatccctgccctcatggggcttacagacagggagtaatcagataattgcacaaataaataatcatagattttggtaaatgctaagacatttacagagggccagaagaaaacatgtcaggcagttccaatctctaggtcaagagagacaggcattctctgttgagctggaagaggaaactaaggcccaggacagggtaggtgtgcctgttgtcgcttggtgagtcagggctgtattaggaccagaagtctcactcctgactactgaataaaaggcctagcttcaggctgatatccatcatgacacatcttcccactcctctccctgctacctcctgattccactccctttggaaaataagttttgatccgcagccctgacatttgacgcccataaacctctaaactccatcttcattatctcctcacccccaccccatacagagtgcagtccagtcaggttggcaagggctgctggtcagggccagatgaccagaaagtgtagaggaggagagaatttggggctttcaggctgggagcagctagggaagggccaagccggaaaagcagcatctgccaggctggtaagagacaaggctcaagtgcaggcactgcgaggaagcgagagtgaggtagaaggatgctctaatgccaggaagtgacgtgcagggacagagggatgggggatgaaggatgaagaatggaggggaggatgaagctgggccacatggctaggaggaagagcagcagggaaggaatgcacagagagctctttgcccccaggtctcttccaatccctgtctcctccttctcttacccccacttctcacaattccagcagagggctgaggggaacacagtaaaattctggagactgcttcctagggagcagagtaccttactaataccccggccagatccatggctcagggaggggtggggtaatccacaggagagtgaaggcgttctagtccccaaggacttttgagaggtcatgcagtccatgcctccgtctcccaacacccaacagaggggaatcatattctctttacccctccctagacatgaagagattctccgcttctcccagaccctctgcttctcacaatccctggctgtggggaacttctcttaaggcacagattggatccctcttgctgcagtctctgacttggtttctcctatcctgtcctctgtggctagagaaagccctcttctgggtgatcacagcggttccttaggatctccccttcaacattccttcatcgttagttggttcttcccagaaggtaagcccaatcccttctactgcagtccctagcatcctctccgttgtcgcatcctacgcctccaaggcagaaatgcacccccttcctcaccaaataattaacagagacaagggagaagaagggagagatccaagaagatggggatgaattaaggagatggagctggaggtggatgcttgacacagaagaaggaagaccggggacttcccaaggcagggcagggacggggtcagcgggcctcaccggtgtcggggtctcccagaaaggcgtcctcgtccttgcggcccctcagcggggccgcgggcgccggctcgtcctcgggcagccgcgggaagctggtgatgctcatgtagtccactggcgagtaggcgcccagggcgctctcctggctggcctcgttctccgccgccatcctcgcccgcgccccccagcagcgcagcgcctgccggaagtggctgcggcgggggagtgggagggcggagggcggggcctgatcttcgcgacagccgggagggggcgcctctcccagccctcggccgtgtcccggtctgactcgcccccgtctgctcagcgctatcagcctgcagctggcacacaggtgcgtgtagatggacagccaggaaggcagcgcagggtcgaggggagagcgcggggcaagcgagacttcagtggctctgcactttacgcagctcagggaccaaaccccttcctccttccagcctgaatacagctagtgtcctcctcaaatcccaggcttccttttcgggccccagaccctttcactgaccgcaaatccctctcgaccccagatcctgtctctgaccccaaactcctcggaccccagacccctccttgaattccgagatcctcctcctccgattttagactcctcctccgaccttagacctctttttcgacttcagactctgtcttcacccccaaacccttttgaaaaccccagcccatgcttcatctccaggcctctttgactgcagacgcctctttggacaacagatccctcctctgacctcagatcccttcccgcaccccgacacttctgactcctctttcaaccgcattctcaaactttagtgtgtgttaggatctttgaaagcggatccccagattccactccagagatcatgattcagtaggctgggatgaggtccttggaacctgaatatttaccatcattttaagagtttttgatgtggttctggaaaggacactttgagaaagaaggagtggtggtagtgatggtagggcaggagtggggcaaggtggggaataggtctccatattctggatgtctgggttctattctgccaccgctcaaacactgtgtaatcttgggcaagacaattagtctctctatcagtttccccatctgtgaaatggaaagaataatagtacccattttagagggttgtcatgaggattaagtaacagaatggaaagcgattagtatagggcttggcacctactcaataaatggcatcatcatcatcatcatcattgccttaatctggtagattcattccctccaaactcatccatcctctctccactccaaaattccaaccacactacagcttgtactacttctccatatccaaggatgagggaggttccttcttttacgaggtctctgttccaaactttcattgtgaagtccacaggaagagaggggggctggtgaagcctctatacacacatcctttctcttcccaaccccagaccagtctcagggatggcctgaagtgcttgaaaaatctactatatacacagcagctgcagtagcaactatagacaggagggggaagcagtgtgtcgggaacagctctggggtttgggtgtaggacttgggagagaggataggaaggagagggctactcagagctgtgtggtaagagtgcccagggagggtaacagtctatcaccaaaaagtgtacccattgtctgtgcctttccccaccccagagagttcttatctcctcagtgatgtttgtagggtctattacactaccctgaggtctaatccctctggtgggacccttccccacttgatgaggtctgcaccttctcagtgatgtccactcccacagtgtagttggcagctcctcactggagtttgagtcctctggtagggtccacgtctccttagtaaagtctatatcctctgtatctcttaggggaaatccatgtctcctcactagggtaagtgcccttcaaagccattcatgtcctattagcagggcccagggcccttcagtcagatctgagaacccccagcaacatctgtgctcccttagtggagtccatgtactgtcagtgaagtgtgtgtcccttcggtgcagtgaatatctcctttatgaaagtatctgaccccttggtggggtctatgtccaccccaagaggtctgtactccttcagtgggccctcagattcccgccctccttgggattgggcagactctcggtctcccatagagagattttttttcagcttagggtgtgcaaggtttacagtcagctgggcaaagtgcagggaagtagctgggaagggaggctgggctagatggggtcacaaggcctgtgtaggcttcaggaggtgggagctgcccgcttcaggcctcagaatcactcttggagttagatatttaagaatccttcctgccttgacagccagtctgtgaaatgatggtgaggtgggcacttctttgtggtgagtgcaggtgagagatggaggagggtcctgcctgacttctttctggggtggaggggctagagagaagctagaggtaattaagcccaggttgtggtggtggtggtgggggtttcccttggtggagtaaagagattgtgaaggaaagaagagaatgtgggccaggtgtggtggctcacgcctgtaatcctagcactttgggagcccaaggcgggcagatcacctgaggtcaggagttcaagaccagcctggacaacatggtgaaatcccatctctactaaaaatacaaaaattagctgggtgtggtggtgtgcacctgtaattccagctactcgggaggctgaggcaggagaattgcttgaatccaggaggcagaggttgcagtcagccgagattgtgccattgcactccagcctgggcgacagagcgagagactccatctcaaaacaaaaacaacaacaaaaaaagagaatgtgaatgatttttcctatttgcacagactttgatattttacaagccttagcttcaagcctgacgaggaagtaaaaccaaatctggagtcaaagaacctagctttggccctaacttggtcgttatttgctctctgactgtgcaccagttccttccctttcctgggtttgccatttgtgcaattaggaggtgggcttattacaaaaaacctgaaggtgtctcctagtcttcacttattgagtcttgtactttagatctggatggagatttgtgaaggcaaggagattgaagacatgtcctcataagagggagaaaatctgagctggttccagggtgagcagagaggaggtgctgtcgccagagcatgccctcaaggtcatgggagaagtttttccggaggacgagaatgtgggtgtggctcagagaggggggacctggagggaagggtgtcacctggaaggaactggtgatagtcaggactgtgcaatcagatcacggggcggctccgcgatggaccttactcaactcctctccttagtccatccctttccctttcgatccttgccttaacccaaccccttatctgtcactccaagaccccaccccactctggtcactccatggctctgcctcctctcctgtcacaaccagccgggttactccccatcactccatgggcccacctcctctcctgtcccgcctggccccgcccctcccttggcactccacggttccaccctctcccttgtcacacccggccccgccccttctgctttcactcgacggcgtcactccttccggcaagtcagctccacccctatccctcgacttttccttatagtatttctgtccttgccaacctcgatccctccccaaccagacacggccccgccccctctggcaccgcccacccgccagactaagccactcccccactcaccaggccccgcccctctacggaggccccgcctctagttcggcctgttttctcagtcccggcacccgccgcgaccgcaaaggcggccgcggttctaggaacttgacgtgatggggcttcctgaggagcgggtccggagcggcagcgggagccggggccaggaggaagctggagccggaggccgggcgcggagttggtctccgccgcccgaggtcagccgctccgcgcacgtcccctcgctgcagcgctaccgcgagctgcaccggcgctccgtggaggagccgcggggtgaggcccggcccgggcgggcctggggtgtcagtgaggagaagagtgggggctccctgggggagtcgggggctcccttgggaagctgaggggtgggtgaggagatggaggttctgtgaaggaagaattgcggttctttgaaaatggaaaagggattccgggaggagacgagggttccatgggagctggggagttccctgcagacttggagggtccgtggtggagatgcgggtttttgcgaggagacgcgggattccgtgagggaagaagtgaggttccttgagattgggacggggaggtcggccaagagagtgaaagtttcatgggaagagaaggggagttcctgaggcgaaaagagggtctctaaggggcgacgggagccttgaagggaggagggccacgaatagaactttctttgcttccctttcacaccagctcagccactgcctcctgagacccttaacctgtgaactgttgagggcaataacgggtctggttcccatcttggggtcctcagattagtaatggagtccccgatctatttttagtatatcggacatcctaatggaaattacgcggtataagactgaacgagttactacgatgtcaagttgttttatttatttttttaacttgggctgggattgtattagtaatagttcagaagttctgatagatggttccatgtctgttaaaatgtatgaggaaaatcggccaggagcagtggctcacgcctgtaatcccagcactttgggaggccgaggcgggcggatcacttgaggtcaggagttcgagaccagcctggccaacatggtgaaacccccgtctccactaaaaatacaaaaattagccgggtgtggtggcgggcacctgtaatcccagctactcgagaggctgagacaggagaattgcttgaacccaggaggcagaggttgcagtgagccacgatagcaccactgcactccagcctgggcgacagagcaagactttgtctcaaaaaaaaaaaaaaaaaaaaaaaaaaaaaaaggtataaggaaaatccccctacccttgccctcagtctgggtaaaggacagatagatagacagatagatagatagatagatagatagatagatagtttgttttgagacaaggtgttgctctgtcacccatgctggagtgcagtggcccgttctaggctcactatagcctgcatctcctgggctcatgcgatctttccgcttcagcctcctgggtagctgggactacaggcggacgccatgacacccagctacttttttgtattttttggagagacgaggttttgccatgttgcccaggctggtcttgaactcctggcctcaggctttcctccttacttggcctcccaaagtgctgtgattacatgtgcatgagctactgcgcctagccaaggagtcaaaattgcacccccattgggaggcagcatgatgtttggttgtgggacaaacatgggccacgaatcaaatccagaaaaatctagatttagaccctggctctgctgttcatttactgtggggtcttaggcaaatttttaagcctgtctgagattccttttcttccatctataagataggtctagtaatacttgcctaatgggtttgtatgaggtctaaagtgtgtaataagtatgcgctataacatgcctgatgcacagtacacattcaataaatagtagttagtctgatacaatataaatcaagcaattaccaagtaatgcaagacaggattcaatcaagtgtaaagtggtggagttgggatttgaaccaagacagtttgactgcagaatccatatcctaatagcaatgctattcctcttccatgaccccacagaatgcatttcaccaaattccatcaaatacagaatttctaccagggaagcagcctcctaatttgtcctctcttgcctagtttcgccaacttgagtctttccagtagatttatcaagacaccattagattgatattatggaaatatgctttcatatgtcactgcaaaaactttcaatggttccctgtttctggcagtttctaattaaaattctgcttttcttttttttttttttttcttttttttttgagacggagtctcgctctgtcgcccaggctggagtgcagtggcgcgatctcggctcactgcaagctccgcctcccgggttcacgccattctcctgcctcagcctcccgagtagctgggactacaggcgcccgctaccacgcccggctaattttttgtatttttagtagagacgggctttcaccgtgttagccaggatggtctcgatctcctgacctcgtgatccgcccgcctcggcctcccaaagtgctgggattacaggcgtgagccaccgcgcccggcctctgcttttcttttaagacctccagataatctagctccaccctgcctctctattcttatctcccactacttgctaccactcccctcattctagatagatcattctccttgatatcctggatacacatttattcccaccttcttgcctttgttcatttccttctgcttctctctacctagtcaaactccaccacttccaatagagcattcactgatcatcccaatttatgctcacctttttcctcttctgaatatctttagtacttagaaactatgccactcatccagattctgacacacacacacacacacacacacacacacacccctaccccccccaaaaaaacccagaaaaactaagtgtgcataaaattcagttttgtagccaaacatggtgacgcacgtctgtaatcctgctactcaggaggctaaggcacgagaattgcttgaacccgggagacggagattgcagtgagccaagattgtgccactgcactccagcctgggcgacacagcgataccctgtctcaaaacaaaaacaaaaacacctcagctttcttcattctttgttgatggacataaatgtggtttataaatagttttatatactatatgcctactattatcacttgaaaatatttttgagtatttgtactctcgttattagctgcgtggtccttggcagagtttcctgtgcttcctgagcttcagttttctcatctataaaattaggataattaatgtatactttgtaagaccataatgtcataaagattaaatgagattagtccagtccctgatacatgaatggcatttactaaatactagctctcatttgctttctctttaatggccatttattattctatggtattactacttgtattactagttttcatcagtttgttattgttgggctattgggttgtttccagtttcactattatagtgttgctataaacatctctttactaatcactttttttctttgtgattattttcttgaagtctattccctatagttgagatagcagagaaaagggtataaaaagttttatgggctgggcgtggtggcccacacctataatcccagcatcctttgggagggcaaggtgggctcccaaagcttgagcttaggagtttaagaacagcctgggtaatatggccaaaccctgtttctacaaaacaaacaaacaatgtgcgcctgtagttccagctactggtgggggagggggtacagctgagatggggggatcacttgagccagggagatggaggttacagtgagctgagatcatgctactgcactccagcctgggtgacaaagagcgagacaccgagctaaaaaaataataataatagaaattaaaaaaaaaaagttttatggctcttgtcatgcattgccttgcaatctaataagactgcgccaatttcttacaatgccattattgtgtaagagtatctgttttcccagggccacccagacattgggcttaataatttttttaaatttttactagttttctaggtatataatggcaccttggggttgatttaatttggatttctttaatacattacaacgttgtacactatgtgatttagctttcaattatattctgtcttgtacattaaaaaatatttcatgtgttaatcttatctctccaactagattgtataagctctaaattgtgtaacctgaaacaaatgacttagcttctatgaattttatttcttatgaaatgaaatgagggggtgataatctgtaaggttacttccattgttacggttctaattgcttctctttcctccaaatttttttttttttttttttttttttttgagatagagtcttgttctgttgcctaggctggagtacagtggtgcaatctcaactcactgcaacctccacctcccaggttcaggcgattctcctgcctcacgctcctgagtagctaggaatacaagcacccgctaccacacctggcaattttttttttttttttgtatttttagtagagacaggatttcaccatgttggtcaggctggtctcgaactcctgatttcaggtgatccgcccgccttggcctcccaaagtgctaggattacaggagtgagccacagtgcctggcatcctctaactcttgattcagtactcagactatcctaaattctctgcattcatatgttttacctgttgagtacattttctgcagaatagccaggcagatattttaagaatgtaaatttgatcatgttacttgcttaaaacccttcaatgaattttcattgctcttgggatatataccaaattccttattatacacagaattgcatgatttgcccagtttatgcatcaattcctgctattctttcccttattctcagtgtttcagcctcaaggagttcctcctaacatatgcccttggtctctttttttcatatgggagtggagaaaaacttctattcatctttcagattttagcaaaaatgtctcaaggaagtttagatcttgacttagtaattgtgtaaccttagacaagttatttaacctctctgagccttgattttcaagtttataaaatgagaaaagcctcccttctagagttgtggtaaggattaaatgagataatacatatgaaaagcttaaagaaacatttggcacatagtgaataacacttatataagtagaagctggagaaggagatgctcaatatataattgctgagagagaatgcacgaattaagagaagaaagagttggtcatggaaggttctgtgggtgaagaattttttctttttactaattacttcattaaaaaatttactttctagttagacagatggtgaaaaaaattgtacctgatttcagcagaactcggtgtgtacctataatcccagcttcttgggaggctgaggcaggaggacagctgagtccaggagtttaagacaagcctgggcaacagcaacaaaaaattactgattgcctattttgtgctaggcattgtgctagtactaggtggctctgattttaatagatggtaaaaagtgagtaggcagtcttgaggacaggaggaagaatttgagtcaagattcagcccaagagaatagaagatgggttagaagagtgttggctgctggccgggcgcggtggctcaagcctgtaatcccagcactttgggagtccgaggcgggcggatcacgaggtcaggagttcgagaccagcctggccaacatagtgaaaccccgtctctactaaaaatacaaaaattagccaggcgtggtggcacgcgcctgtagtcccagctactcgggaggctgaggcaggagaattgcttcaaccggggaggcagaggttgtggtgagccgagatcatgccactgcactccagcctaggtgtcacagtgagcctccatctccaaaaaaaaaaaagtggtgggtgctaagattagacaggtaaagaagggacccaggtggtgggtcctagggcaaggaagttataatttggtcctgtgtatagactggtaagccttctgaggctaaatatgtctcagaagattaatgatatctgggcttccatttctgttgcagaattctggggagacattgccaaggaattttactggaagactccatgccctggcccattccttcggtacaactttgatgtgactaaagggaaaatcttcattgagtggatgaaaggagcaactaccaacatctgctacaatgtactggatcgaaatgtccatgagaaaaagcttggagataaagttgctttttactggtaaaaatatctatcttatacttggtggcagataaaaacactcatttgatacttacaacaacccagtagagtaagcaaagtgtcatcaacttaatgcctcaggtgaggaaaaatacctcaaggaagctacatgacttccttcagatcacataactagtatgtgacagagctgacattcaaagccaagtgtcctgacttctagtctagtgttcttggctttgtagttgaagagggagaaagggcattggcaaatggaagagaacaagactgagtagctttcttcctcattcttgctttggaagacaaatagtattgggtttttcaccaccactactaccactaccattatcattatcttttacagagctgtgtgccagaaactatgcttaagtgcttaacaaatactatctcctttgatgcttataataattatgaaagcactatttgttttcctcattttacataggtgaaaactgaaattctgagaagtcaagtgacatatctgaagtgaaacaactagctagaagcaaggctgagattcaaacctaggcagtataattacagagcttacacacaaccatgacactctattattcctctaattccttaccttggcctctcaacaggtttgtaaaataggaattcttagtttcattttataggtgaacaaatgaagcattgaagggttatgtagtgaataaggtcatagagtgaataagtggtagagccaggattcaaattcaagtctgcctgactccttgcttgtaccactaggccatgcagcctccccagcaggaaatttctaagactgcttctcccaggaatttagctgtctaggagatactactataccgaatccaaataggacttagaaattccaataattggggtgttgcttctgccacaatctatgagcactcagagttgatctattgtttttgtattgttttgttttgttttgtttttttggagacaggatcttgctctgttgcccagcctggagagcagcggcatgatcttggcttactgcaacctctgccctgcctcccctgctcaagcaatcctgccacctcagcctcctgagtaggtgggactacagacatgcaccaccacgtttggctaatttttgtattttgtatttagtattttttgtaatgatggggtttcaccatgttgcccaggctgttctcaaactcctgaactcaagcgatccacctgtcttggcctcccaaagtgctgggattagtgtgagccaccatgtctggcctgattaattatttaagctagccaataggagcagcttggatgcttcatgggagagttaaattgaaactcactcaatatctttgcccagtttgtgtgatatattgagaagagccttaacctgagagacaagaaatttaggttctcctttcaactctgccattaacatgttatataaccacagacaaggcatttaactaagagtcagtttcctcttccataaaatggggataataattctatccttgtttttctctctagattgttgtaagaatcaaatgagataacgttgtaaaagcacttatttgtttattggaaaacactgtataggtgtgagtggtctattattatactaccattgcttagttgggggccagtttgtcactgaaattcactgtccattgtgtctgttgagactctctttagcttctgctctagagctttatgcttgagctccagccaacacttgggctcatttcccaggctctttaaagatcagaaaacctttaaagatcttcaaaggaggccgggcatggtggctcatgcctgtaatcccagcactttgggaggctgaggcaagagggttgcttgagcttaggagtttgagaccagcctgggcaacacagtgagacccccatctctatttcacaaaaaagaaagaaataggctgggcatggtgcctcatgcctgtaatcccagcactttgggagaccaaggcaggtggattgcttgagctcaagagttcgagaccagcctgggcaacatggcaaaactccctctctacataaaagacaaaaattagctgggcatggtggtgcacgcctgtagtcccacctacttgaaaggctgtggtgggaggattgcttgagcccaggaggcggaggttgcagtgagcacagatcacaccactgtactccagcctgggcaacagagcaagaccctgtctcaaaaagtaatagtaataaaaataaaataagaaaaataaaaagaggaaaaaaaagatcataaaaggaaatgcttgtatctgaatttgttccctggtttgaaagaactcaggtgcctaatggaaaacagaatacacaggccagagttttcaatcactggagagttttccagaatcctgaggccctttctttctagagacaccagttcccctaccacccttacctgaacaggctctggagagcctctctttccccatctgtaaaatgagaggagtagactagatcagcattttccaaagaatgcttcaggaactgctaattactggagatattagtagggggcttcttaattcataaaatgattgagtctgagaaacactacataataaattgcctttgtgtgagattcccaatgtgtattagcatagtaaaatctccaagatgtcctatattagagatacctgattaattttgtttaacataggatttcctgaatttattgaagccccaaacactttttgccagcatgctattgatatcacaagaagcagtattccatggaacacccactggggaagcactggattaaataatctctaaatttacttccagtgcaaaattctgtaactcaaaaacaagacatcctcactccatttttacattggtcactccctcaacaagaattgttaaagatattggatactcagggctgcattaggcattatggatatgggggtaaaaaggcaggagacaagtaccatataggcaattactatttaattattttatgtttatagtaaagcaaaagcaaaatacaaataaattgcattttattataagaaagtaaagtgcaaatatgccggatatgtggttacatccctttgttgcctctatatttttaaatgatatgcttatactgctatttttcatcatttttaaagaaagtattgatttcttactacgatagataagaatttagttcttatatacctctctaacttccttctctcttcttctcaatataattatagctgttttctagttaatttaaaatcagtttacataagaatagcatactgtggttatatttccttttatgtacggatttttatttactctgaagttaataattgcttactgggctgggtgcagtggcttatacctgtaatcccaacactttgggaagcagaggcgggcagatcacctgaggtcaggagttctagacaagcctggccaaaatagtgaaacctcatctctactaaaaatacaaaaaaaaaattagctgggcatggtagtgcacacctgcagtcccagctacttgggaggctgaggcagaagaatcgcgtgaacctgggaggcagaggttgcagtgagccaagatcacaccactgccctccagcctgggtgacagagcaagactctgtctcaaaaaacaataaaagtaataataataattgcttaccgtttttctttttgtactatttaagcctttatcatatatttaatattttccaatctcactatcatatgaaatcctccttttcctcccaaagttctccctcttggagctcacttctttctgttctaattcttactaatgcttttaaaaatgacatcttttctgtgattcgctccaattgatatacttcttatagaaacacattatggctttcttcttaactttatgtcatttagacagctatggtggcattaacaagccacatttgtagctagtttcttgttttggaacatacattgtgtagtcattgaaattatccacaaaggaaatggtgctcttaggaaagtactcccattatccaaaatagaaccatattaaggaataatttggccttttacttttggcttgacacattgcaaatgttcacggaatagtagtatttttagaacttgaagtgaccgttagagtccatctaggccaactctcttcaaagattggtagattaagggacaaagaagctaagtgatttgcctaagggtcatacacctgtttgaagacagaactgagactaatctccagatactctcactcctagtcaactattttttttcactcgtgacactacctcattattctagtagtccagcacttggctgtgacagataaaaagagaaattagccacattagccaaactgatttaaattaactttaaaataccagataaaatgtgttattaggtttaaatgtcccagaccctagtctcatggaatttacattctatttggaaagaccaaatagattggccgggcacaatggctcatgcctgtaatcccagcactttgggaagccaaggcaggtggatcacctgaggtcaggagttcgagaccagcctggccaacatggtgaaaccctgtctctactaaaaaatacaaaaatcagctggatgtggtggcaggtgcctgtaattgcagctacttgggaggctgaggcaggagaatggcttgaacccaggaggcagaggttgtagtgagccgagatcgtgccattgcactccaccctgggcgacaagagcgaaactccatctcaaaaacaaaataaaacaaaacaaatagatctacataaaaacagcctgggccaggcatagtggctcacgcctgtaatcccaacactttgggaggctgaggcgggcggatcaccttaggtcaggagttcaagatcagcctggccaacaagacgaaaccccatctctactaaaaatacaaaaatagccaggtgtggtggcgcactcctgtaatcccagctacttgggaggctgagacaggagaattgcttgaacccaggagacagaggttgcagtgagccgagatcaagccaatgtactccagcctgggcaacagagcaagactccatcaaaaaaaaaaaaaaaaaaaaaagcctgaaaagaattatgggccaaactgcaaagagctacttacacaaatagttcacagaaaggaaaaagccttatagggaggcaggataatataaagattaggagaatgggtgttttggtgtcagactaacccagtttgagtcctatttttgccactaattagctgtctgatcttgggcaagttacttaacctctttgagcctcagttttctcaactgttaaacgtggataaaaatagcttttatctcatggagttgtcagttttgtaagattgaataggataaaaaaaaacatgtcaaattcctggcacattgaatgcacttaaatattagccaccacaattatttatattggaacagtgagaagaccaagcatgtttagagtaaaaggtttatgcagggaacaatttattcattcaataaatgcttactaagaacttattaagtgccaggcactattctaaacaaagttcttgccctcatggaggttatagtccagcttgaggagacagacaataaacatagaaaccagtaagtatatgacaggtagtgatgagtactatagaaaaatatagagcagagtcaggggaaagggaagtgacagtgcagagtgggagctgataaggaaagaaccttttgataaatatgacatttgagcagagatctgaaggaaagtatggagtgtgccacgcagatagttggggtagggaggggaaatgttccaggtaggtggagaacaaatgtgctgctgcctggtgtgtttgaagactagctaggaagttagtgtagctaaaatgtgtgagctagggaagagagagtagtattgacaccagcaggatattagatcatgtcacatcttgaaagccaatgtagactctggccttttattcatggtaaaatgggaaaccactagacaatcttttttttttttttttgagacagagtctcgctctgttgcccaggctggaatgcagtggtacgatctcggctcactgcacccgccatcatgcctggctaatttttatatttttgtattttattttatttttttttgagatggagtctcgctctgttgcccaggctggagtgcagtggcacaatcttcgctcactgcaagctctgcctcctgggttcacaccattctcctgcctcagcttcccgagcagctggtactacaggcgcccgccaccatgcccggctaattttttgtatttttagtagagatggggtttcaccattttagccaggatggtctctatctcttgacctcgtgatccactctcctcggcctcccaaagtgctgggattacaggcgtgtgccactgcgcctggccaatttttgtatttttagtagagacaggttttcaccatgttggccaggctggtctcaaactcctgaccttgtgacccgcccgcctcggcctcccaaagtgctgggattacaggtgtgagccaccatgcccacccacaccactagacaatcttaagcacagacgtgataatgatttggcttctatttaggctctatcttttatattaagaagagactgtagaaggggaaaagtagaagcagggtaaccaattaggaggctattgtagaaatccaggtgatagattgtggtgatttagaccatagtagtagtcatgaagatggttagatgtggtcaaattctggatctattttgaatgaagaacctatggaatttgctgacttggattgggtctggggagtgaaagaggagttacggttgtcatcaacagcggatgaggtccaggtatgggagatcttgactatttttggagatctgtgaaaggattgcatgcagcggaagtcgcagcagaggttaagaggattcatctggatacatatggaaatgggaatgtgaagccagagaactgagagtttgttattcagtcctgaactaggatgctgctggtgggaatggaatggaacaatgacattttagagtgatttgataattttacagtaatttaatctgtataaagggcttagtgcttggcagaaagtgtattagctatttttttcattatggaaagaaaccagcacaggtaactaggtgtgtagatggtggagagacagggagaaagtgaaaggaaagagtcaaggattctcctagtctatataaacactgcctcttttgaaggcacacgttcatctgctccaagggctaaattttccctgcaaaatacagactttggttccaactttctcatgctgtcttccccctggtgtggcagataaatatgttagtgggggtgcatgtgtatatgtatgggaaaatgatcagtgacaaggtattgggatagtcattcagggagagagagtcagtgagggtgttagaggtagctgaaggagtggaagggagttagctagttgaaggaacactggaggactgtcggggatttgggggattaagtaaaaggtttataaggagagggtggaaagagtggttgatggctgatattctgatcatttatactagctactcagtctctactttttctagaagtccccagtaaccaaagcccaacacatttggtatcgttgattccttccattgtttgctttgctttgggttgcctaaggctgtggttatctctgagccacctaaattctcaccctcagctgaaatcactactgtctcttcatggctctcagtatatttcaatccttcttcaggaactggagcttttgagaataaggcaactttaggattgaccctaggacagaagctctgctctcaggatccttgtatgctcctgaatatgaattccatagtatgatatttggagctccccagatccttgtaggcatatgtgtgtgtgtgtatttgaggccaaaaaaaaaaaaaaaaagtccctacctccccatgtcactgaagtgaactccagaatatggacctagataatttagagtccctggacatgaatgataggacaatatactctagggctctgattttccatatcaccttgacaaatctccttgacaaaacatgggcttgcctcaccttctcaaccatccccaccttctcaaatacacacactacatctatatctttactagtttcacaacagcatatctattgattaagatatatttggtaaagaaaaacactcattttgagaaagatgacttcagaccattctcttcctctctctgggccttctctttgtgggcatgatgggaaatgaactacagatactctgcaaggtccctttcatctctaatcttccagaattctatgactgtttctgaagagaggaagcagtttttagaagttctgttgcaacctgtagtgactctgtggtgactcagtaggcgggttgaatttctgttgagatggtaagaaagagggaggattttgtttatttatttatttatttaatttattttctataatgatgttgacaccataaagcaagaattttagaaggtttggaatgaaggggctgaggaaggagtctgttcctcttgcctgagggttgtttgtggctggtagcataaatactcaaagctaatgggagatacatgggaaatacctgttgttgggaacagtctttctccacttgaatgaggtgagcagattgtggaggtgagctggaggatttcatgtttaaggtggatttctaacctgcttctctcatttctccctgagttttatgacccttgacactttacagaacacctccctaaagtggtgaaaatgagacaagtaggctgtactttccgagtcactttttttggaagtaggtggcatatgaataataaatgtattgctctgaagactctgtcttgaggcctgtttcagtgtcctgagcttcatatcagctacctgagtttgtgtctgggccaacttcttatactggcatgttcagtaaacatttaatgaaaagaatggctttagttaatgcccttttctaagccttctttttcccacttataaactgttagggatgtacaagactcttttttaagttacttctggcactgaccttcagaatttctgtcacaaatgcagggaactgcctggataaattctctacatttctgggagaagttaggggagaggaggaactggcctcctctcctttgaagatactaggtggtcagatgggagcaggggttcttgccttatggcagccccacatttataacaattaactcagaaggcgtggagttgaggatgggccttcccccacttcctggatttggtttgggagaggttgggcactggtaatgatccccggtgtctcacatcttgaacctctgagaattcaagactctcagtttcagtccttagaggtcatttggtccaattcccacacaaatcaggaattgtagtaccaatatcccaatccctaacaatccccataagttatcattctgattctgggtcattctcattcaattcctacatctctaccttaatacttactagttgggcaagttacctcacctctttaaacctcaattttcatgtctgtaaaatggaaataataagtcctgtgacatagattgttgtaaggaagaattggaataatctatataaagggcttagtgcttggcaaaaagtgtattagctatttttattattatgccaaaaccctatacctaaaacaggtaacagcggtgctgatctggttggagcatggatgggaggcctagagccacattctgtaggcttctccaccctgttactgtgttccctgtgaggtgtgtgtctggaatccctagggatttgcaaagctcagtttgaaaacccctgatctagtccagtgttcttgttttataaatgaagtgatactgagtccacagtctcaggttcctcatatgatgtggcttcctaaacaaccatgtcggtctcccctggatatactttagttggccaatatctctcattaagtattccagctatggtctgacttgaacagggtactattaccattctttcactttacatatctaagattatattagcctcattgacagccacactctccagtcagtttataatctctcataatacttaagattttccttttctttctctctttctctctccttttcctttttcctctttctcctttcatttccttccctttccttcccttgtttgtctcactctgttgctcaggctggagtgcagtggtgcagttgtggcccactgtagcctcaaactccaaggtccaagtgatcctcccacctcagcctcctgagtagctaggagcacagtcatgcaccaacacaatcagcgaattttatttttatttttattttgagacagaattttgctcttgttgcccaggctggagtgcaatggtgtgatcttggctcgctgtaacctctgcctcctgggttcaagcaattctcctgcttcagcctcctgagtagctgggattacaggcacacaccaccatgcccagctaatttttttttttttttttttgtatttttagtggagacgtggttttgccatgttggccaggctggtctcaacttcctgacctcaggtgagcttcctgcctcagcctcccaaagtgctgggatcacagacgtgagccgttgtgcctggccagcttggaattttgaattagagaaggtacaagagaagactgcaaaatctcagatataggagggccttggactacctattatctctttttgggatataaagtttttagaacagccctcttctagggttctaaggtctggtctacttatggttttactatcatggtttattatcatggttaccttatggttttaccatcttggagcatcattattttatttaaataaaataaatacaaccctgaaactattcaccctggaatactttacacacagagttgcccgtacagaaaacatctctagagcatatgaacacctgcatttctaagtgtgatttttttgaccagagactaatttttgaaaccaacgtttgcttctttttgaccatgatattttaatacatgaaaatctatccaaaggagcagtcacagagggttcttgttgaactttagtttctgagctgcttttgaggatggttacttgaggtgtcctccaaactgccacatatagtgagttagagaatctgccaggcacagtggctcatgcctgtaatcccagaactttgggagactgaggagggaggatcactgaactcaggagtttgagatcagcctgggcaacacaggtagaccccatctctataaaaaattttaaaattaggccaggcgtggtggctcacacctgtaatcccagctactcgggtggctgaggcaggaaaatcgattgaacctgggaggcagaggttgaagtgagccaagatcatgccactgcactccggcctgggtgacagagtgagactctgtctcaaaaaataataataataaataaaaaattagctgggtatggtcatgcatgcctgtggtcccagatatttgggaggctgaggtgggaggatttcttgagcctgggaggttgaggctgcagtgagcggtgatcgtgctactgcactccagcctgggtgagaccctgtctcaaaaaagaagttagggagtcctaatacaacatctggatttgttaaaaatctgtctagttgttttcatatgatgggaaacaaactgacagaaatctaattttatttatatggatagccatgctgtacttgctaagaccacaagaataggctcagagagaggggaaagtttgtgtaaattatacattgaattaggggtaaacaatctagtctgatgactccatattcagagccagggtttcccaattttagtttatgtaaataattacctgaggatgtcgttagaaatccagatttctggaccctatcccagactattgagttagaatctccagaggataagacctctgacttgtatttttgtaacctcctcagacaattctgatgttggggggagggacaaagtaccattgaaaaattatttagattaataaccttaaactcttaaaattatatacctaaaagaattttgaaaaattatgtaactcttgacataatgttcatatctaaaaattttatcataagatttaaaaattgcaaaaaatcgaatttccaaaacattttacatattatatacacacatatatatatatgcacatataggttatacctctttcaaaacattggcactgcaaatttagctcatataatttatagaagacatctaccatacaacctgttttgcatagccagttatcacccaacataatcagccaaatcagatctactgtgttagaaattgcctaacttctttcttaagataaatatgttaatatatgactctgtgataactgtttcacttctgagttgtaattctaagagatataaggcaagtagtcttgccatgagtttgttacgtggatgaattaagatgccaattctttcaatactgatttctcagagaagctctcattgatttgctttcttggggctctccctcagaagttatacattctcaaattgtccctttgtttaacactttgttcataccctgtcattgtaccataataaagtttgagataagagagagctatgacattcttgtttaacgtgggagaagggtaattgtaaaagagagtgagaaagaagaaccaactcagacagatcattgttaggaaatattacatatggaagttgaggatctagacatttattctcttcatatttttctgtgcaggtactcacaggaatagagtaccgtagattgaggactaatgatttaaactgcctttgacctagataatagagaaccattgtaatgaatatttttgcatgtgtctattatacttgagagacttgatgtacacataaaatgatgcccctggattttctttccactttctgtttctgctctaggcatattcctcttttgggctgcattccaaatgctctgccctcattcacttgttataggtaaggccagcatgggacacaggatggtaggaacaagtgtgtgattcccctcctgtaagtaggcatgtaggcagtgagaaaagagaagaggtacacaatccatcgggcaccaaagccactttggccaaggggaacatgcaaaaggtatttggatcaaggcctgaaaatagctggcaagaggacagggtacaataatagcccagactgcagggcaggagtcccatactctgaacctcagctccagggttctcttccagcctcttcacagagtcccagactgagcccactgtaggatctcaagaaacacttcttgacatgattccaaaatccattccacaaattccactcttgtctttcctctgcctgtccagcatctatcttgtttatctgtatcctatcttatcccctctccttccatactttctctctttgatcatcttggatccagctggtcatataagcagagataagtttgttcatttatttattcattcttttatctattcattttacaattatgtattaagtgctcactgtgtattggcctttgtggtaagcactaaggagaaaacatataaaaagatatcctgtctgccattaaggaactcataatccagtgagggaaacagatgtctacataggactctagtgctagaaaaaaataagtgcccaagtgttgtctttagaaataaacaggctgggcgtggtggctcacgcctgcaatcctagcactttgggaggccaaggcgggcggatcacttgaggtcaagagcctggccaacatggtgaaaccctgtctctactaaaaatataaaaattagcctgtggtggcgggggcctgtagtcccagctactcgggaggctgagacataagaattgcttgaacccgggaggcggaggttgcagtgagccgagatagcaccactgcactccagcctgggcaacagagctagactgtctcaaaaaaaggaaaaaaaaaaatagaaagaggcaagaatgaatgaatgaatagtgcttaatctttctaatgaatgaatagttacaacctttctggaaaggaaggtttgtaaagatgtctgtattttccaaattaatctgtacatttattgcaattccaatcaaaattgcaattatattttttattgagatataatttataccatataattcacccatttaaagtatacaattcatatttttaatatatttgcaaaggtgtacaactttcaattttagaaaattttcatcacccccaaaagaagtgcaatactcattagcagtcatttttcattttcccccaacttcttctcctccagctctaggcaaccactaatctactttctgtctctaaggctctgccttattctggatgtttcatataaatggaatcatataacacgtggccctttgtgtctggtttctttcactaagcataatgttttcaaggttcatccatgttataggccggatgcagtggctcatgtctgtaatcccagcactttgggaggctgaggtgggtggatcacctgaggttggtggatcacctgagcttggcagtttgagaccagcctggccaacatggtgaaaccccatctctactaaaaatataaaaattagccggccatggtggtgcatgcttgtaattccaggtacttgggaggctgaggcaggagaattgcttgaacccaggagacggaggttgcagtgagccaagatcatgccaccacactccagcctgggcaacaaagtgagactgtcttaaaaaaaaaaaagttcatccatgttataccatatatcagtacttcatccttttacattgctgaataatgttgcattgtataactgtatcacattgtgtccggaattggtgggttcttggtctcactgacttcaagaatgaagccgtggaccctcacggtgagtgttacagctcttaaggtggcacgtctggagtttgttccttctgatgttcggatgtgttcggagtttcttccttctggtgggtttgtggtctcgctggctcaggagtgaacctgcagaccttcacagtgagtgttacagctcataaaagcagtgtggacccaaagagtgagcagcagcaagatttattgcaaagagcaaaagaacaaagcttccacagtgtggaaggggacctgagcgggttaccactgctggctggggcagcctgcttttattctcttatctggccccacccacatcctgctgattggtagagccaagtggtctgttttgacagggtgccgattggtgcgtttacaatccctgagctagacacaaaggttctccacatctccaccagattagctagatacagagtgccaacacaaaggttctccaagtccccaccagagtagctagatacagagtgtcaattggtgcattcacaaaccctgagctagacacagggtgctgattggtgtgttcacaaaccttgagctagatacagagtgccgattggtgtatttacaatccctgagctagacataaaggttctccaaggccccaccagagtagctagatacagagtgtccattggtgcattcacaaaccctgagctagacagagggtgcagattggtgtatttacaatcccttagctagacttagaggttctccacttccccaccagactcaggagcccagctggcttcacccagtggatcccgcactggggctgcaggtggagctgcctgccagtcctgcgccgtgtgcctgcactcctcagcccttgggtggccgatgggactgggtgccgtgagcagggggcggtgctcgtcgggggggctcgggccgcacaggagcccacggtgggggtgggggaggctcaggcatggcgggctgcaggtcccgagccctgccccgcgggaaggcagctaaggcctggcgagaaatggagcgcagtgctggtgggctggcactgctggggtacccagtacaccctccgcagctgctggcccgggtgctaagcccctcattgcctggggccggcagggccggccggctgctccgagtgcggggcctgccaagcccacgcccactcggaactccagctggcccgcaagctccgtgcgcagccccggttcccgctcgggcctctccctccgcacctccctgcaagctgagggagccagctccggccttggccagcccagaaaggggctcccacagtgcagcggtgggctgaagggctcctcaagtgccgccaaagtgggagcccaggcagaggaggcgccgagagcgagcaagggctgtgaggactgccagcacgctgtcacctctcaacgttatcacatttttttctttctttctttctttccttctttctttctttctttctttccttccttccttccttccttccttccttccttccttccttcctttctttttctttcttttctttcttttttgtttttttttgagatggagtcttgctcttgtcgcccaggctggagtgcaatggcatgatctcggctcactgcaacctccgcctcccgggttcaagcgattctcccacctcagcctcccgagcagctgaggtacaggcactggccaccacgcccggctaatttttgtatttttagtagagacggggtttcaccatgttggccaggctggtcttgaacacctgaccttgtgatccacccgccccagcctcccaaagtgctgggattacaggcatgagtcaccacacctggccccacatttttctttattcattcctcaattggtggacatttgggttgtttacactttctgatgtcatgaataacgctactacaaacctttgggtacatgtttttgtgtagatgtatgttttcaattctcttgggtatatagctaggagtttaattgctgagtcatatggtaagtctatatttaacctattgaggaactgccagactgttttccaaagtagctgaaccattttatattcccggcaatgtatgaggtttccaatttctgcacatgcttgtcagcacttgttactgtctgtttgtttgattatggccatcttagtgagtgtgaagtgggatctgattgttattttgatttgtatctccttgaccatgcctgaccttttttttttttttttttttttgagactgagtctcgctctgtcgcccaggctggagtgcagtggcacaattttggctgattacgacctctgcctcccaggttcaagagattctcatgtgcagcctcccaagtagctgcgactacaggtgcgtgccaccatgcccggctaaatttttttttttttttttagtagagatggggtttggccatgttggccaggctggtgtcgaacttctgacctcaggtgatcctcccaccttggcctcccaaaatgttgggattacaggcatgtgctactgcacctggcccattaactgccttttgaagactggccggtacagtcctggctccctcaataggtgaggaatcaatgtttagggagaaatttcataaatagtccactgattgaggctatttactctagtttcatcagttttgagttggtgaaaagcccgtccaaatttgggtgataggatgacagttgattccagtttttgaatcaggagctgagtgaggctgcattagggtctacaagttagatatcatttgaaaccagaaatctgtggtgttttcaaaaggaactttttctaaggaactaagggaaaaccaaacagaatgatgaatttctgttaagtacactaaaattccatccttggtagttgtcaacctcacagttctcagagttcctacatttttatttttttccttatgctaattctgaatttggaaacaataccccccttttggaggccatgtcatttaggaggagaaggccctgaactagacatttagactcaagaactgtgctatccaacatggaagccactagctacatgtaactattgatatttatagtaattaaaattaagtaaaataaataatccagttcttccgccacatttctagtgtttgatagctatatgtggctagtgactaccattttggacaacagtgctttagaatagtgttgctactaatttgtaagtaaccttgaggtcatcactttctatttctgtgccataggtttctcaatggtaaataagagtggtgagtctcaaaagtaccatcctcttctggaattctttctttttctcttttcttttctttctttttttgacaggatcttgctttgttgtccagtctagtctctaactcctagcttcaagtgatcctcccacctcggcccctaaagtgttgggattacaggcatgagccaccatatctggccctcctctggcattctgagtaatctgtggttcagtttttggggtgtgcctccatctacctcctccttcagcccttcttgatacttactgcagctagggcagaagcacccagagggaacattaggctgctaattagtcaaggtacattgctcccattccctggtgaaagggaaattgacttgtgggtatacttatatcttgagtgctccacaattgtgcagtgctttatggatcacagaactctttcacattgttttttcattttatagaatcaaagaatctcaaagttggaagggctgtaaaggtcatctcaaacttcaataaccatgaattatatggggagcttatgcaatgaaaatttcaaggccccactccctggagaataatctagtagaagtaggtgtcagggttaccctggcccaacctgaacaatcctgtgctgcatgggaacttggtactgcattattaacactatctgaccactctttgagaaacactggtcttgcttggtccccagccatattgtggaggctgctctttggtatcgctacaaatcccagattcaacatgatatctccagggtcaggaaactcctgaaggagtgccttccatctttggacatctctaacagaaaggttttttttttaatatggagctctcccaattgatgtagattttccatttatagttatactacattagtctacttttccccataatgatcctttagattcatgcattcattcagcaaaaatttactgaacacctattatatacaaggttctgtacgagacaatgagggattcagcagtgaacaagaccaacttggcctctgccttcagaaactgtcttctgtctagtagggaagataggaaattagcaaaaataataataagtaaacaagtaatattaattctattaataatattaacaataacaataagtaaacaaataacaaaagaagtatagtttgagaaaaatgctgtgaagaaaataagcagtgttatgatgaataacaagaagagctgatctacttagggtggtcagggaaagcttcactaggaagtgacatttaagctgagatttgaaacacaagaagagttggggaaagatagttaaagaatatggcatgttctatcagtcagaaggccagcatgtttggagcctagtaggcagaataggagaatggcacaagatgaagttggggaggatacaaggcatagcaggagtgcggattttcttctatatgcagtggaagctgttaaagggttttaagcaggaggtgatatgatctgatttgtggtttgttttattgttgtttaattaattaattaattaattaattaattttgagacaaggtctggctctattgccctggctggagtgcagtggcaacatctcagctcactgtaatctccacctcctgggctcaagtgatcctcccacctcagcctcctgagtagctgaaactataggcatgtgccaccacacctggctatttttttttttttttttttttagtagagagagcatttcgctatgttgcccagtctggtctcgaactcttgggctcaagcaatcctcccaccttggcttcccaaaatgctgggattacaggcatgagccaccatgcctggccaatttatgtttttaatagatcattctgtggccgggtgcagtggctcatgcttgtaatcccagcactttgggagccaaggcaggcaaatcacttgaggtcaggagttcgagaccagactggctaacatggtaaaacttcatctctactaaaaatacaaaaattagccaggcatggtggcatgcacctgtggtcccagctacttgggaggctgaggcaggagaatcatttgaacccggcaggcagaggttgcagtaagtcaagatcacaccactgcattccagcctgggtgacagactgagactctctcaaaaaaaaaaaaaaaaaagatcacagatcatgctgggtgatgtgtggactggaagggaacaagagtgaagtgggaaaccagttaggtgggcattgtggtcatccaggcaagagatgaaggtagcttgaccggggtggagacaatgaagatacagatttttgagacttgctatcacatctctcaatatcttctcttccacaaaataaacagttcagtgttcctctcatctcctctcataacaggtttggtgtctcttctcacctgggtgtttctcctcctgtttctcctccatctgattcctctgtaaagaactcagtctttccctcagctgtttcttcctatcctgtgccttgcttgtagttctagggaattaaaatcttcaattcaatgactatcgttctcatataaagaggggagctgggtgcagtggtgcatgcctgtagtcccaactactctggaggctgaggtgggagaatcatttgagcccgagagtttaagaccagcctgggcaacatagtgagacattgtctcaaaaaaaaaaaaaaaaaaaaaagttggggggtagcaccagtcttccctgtcattagtcaattaccagtctttcaattattcaaccatgaccctcgaatacctattgtgccaattgtgcttggaggagacagagaagaagacatgatctctgccctccaagagctcagggtataatgggaaagataaggcccaaataaatataataaaagctagaaaaacagatcacaaagaaagtgagataaagggctttgggaggaagaaagaacttttagcttttgggtaggtgagaaaaagagaaactaacaaaaatttcatggaaaatgttaattcagagaacctggggctggagaggagcgcagggagtatttttttttttttaatgtggtgatcaaagataaccttactgagaagccaacatttgagcaacgactcaaagatagggaataagtcatgtggctatctagggaaagaacattccaagtagagggcaaaggctctgaggttaaatgttcttggtgcttttgccaaacactggggaggccgtttggctggagcagagggaaagggagaggaagagagaatagttgtatgtgaggacagagaggaaatgagggactagatcatgtaggccattgtgaggactttgacttttactcaaaatgaaatgggaagtgatctgagcattctgagcagaagggtgacataatctgaactacctaatggtagttttggactaggatggtagaaatagatgtgaagagaggtagtctaattctaaatggattttgaatcaataatgggttaaagtaaatttcgagagtgtgagaatgaagtagttggagaagactccttggaggaggttccctaggggaagaagatgagaaggactagtgactgtgtaccatgggttgtcacaccaaccatatggcctccaggtgaaggaaaagtagtttggtttataccaagggttccccatgttatcccaccagctaaatttctcattaatagttttgtttgattcacagtgtttaaaccttttttttttttttttttttttggtaggcaggggcgagacagggtctctgttgctaggctagagtatagtagcatcaacgtggctcactgcagccttgacctcccgggcttatgtgatcctcctattttagcctctcgagtagctgggaccataggcattagctaccatgcttggctaattataaaattttttgtagagacaagttctcaccatgttgcccaggccagtcttgaactcctgtcctcaaacagtcctcctgctttgccctcccagagtgctggtattatggcatgaaccactgcaactggccttaaagctttaaaaaaattagtggtcaacacatataaattcagaagttttttttttttttttgagacggagtctcgctcggtcgcccaggctggagtgcagagtgcagtgcagtagtgtgatcttggctcactgcaagctccacctcctgggttcacgccatcctcctgcctcagcctcccgagtagctgggactacaggcgcccgccaccacccccggctaattttttgtatttttagtagagatggggtttcaccgtcctctcgatctcctgacctcatgatccgcccgcctcagcctcccagagtgctgggattacaggcgtgagccaccgtgcctggccaattcaaaagttttgacaaaaatagattccaggctgctattgaaaaatcgaaaaaattgacaacattgagccctgattcctagcaagcaaaagctgacaggaaccaagtttaggtactagatgcctccttttgccagagcatgcatttgccagttttcctgtccttccccttccctattgttcccctgaaactgaggctaaggtttattatacatgtgctgctgttttcttatagggaagtggaaagggaactatttcttatctttatcatatattttctttcatgtggtccacttatttacattccgtgcctagatcctgccaatttttgagcttgcagctcctggtgtagaggaaagaggcctggaccttaagtcgtggtccctgctctgctgtggtaacccaccctgtgatgccaagcatagctaatagcctctttggatctcagagttaagagactaaattggatgttcttttaagagttctgatatcctggccgggcgcggtggctcacacctgtaatcccagcactttgggaggccgaggcgggtggatcacaaggtcaagagattgagaccatcctggctaacacggtgaaaccccgtctctactaaatatacaaaaaattagctgagcgtggtggcaggcgcctgtggtcccagctactcgggaggctgaggcaggagaatggcgtgaacctaggaagcacagcttgcagtgagccgagactgcggcactgcactccagcctgggtaacagagcaagactccgtctcaaaaaaaaaaaaaaaaaagagttctgatatcctagagggcttgggattttgcagtaggccaataccctgcccctcacctttcccaaccagccaggggccccagcctggtgtgtatgtcagagaaagaagacactggaatgagtaaggtgcttatatcaataatgtataacttgagcccatagccaaggagaggaatgcacactgtggtgtgtgtgtgtgtgtgtgtttcacggttggaagtgggctcaaataagttgtacttgcataggttgtgcttatttcttcttgtgcactctctatgtactaggctgtacttgaggtgctagggatgtagcagtgaagaaaacaaataagatctctgctgtcagctgggtgcagtggctcacgcctgtaatcccagcactttgggaggccgaggcaggcggatcacctgaggtcaggggtgtgagaccagcctggccaacatcttgaaaccccgtctctactaaaaatacaaaaattagccaggtgtgatggtgggtgcctgtaatcccaactacctgggaggctgaggcagggagaattgcttgaaccctggaggcggaggttgcagtgagccgagatcgcactattgcactccagcctgggtgacagagcgagactccatctcaaaaaaaaaaaaaaaaaaaaagatctctgctatcatggagcttatattccagtgaagaaaacagataatatataagtaattaacatacatgagataatttcaaataatggaacgtttcatgaaaaaaataaaacagaatgtgttttttttttttgagacagtcttgccctgtcacccagggtggagtgcaatggcgcaatctcagctcactgcaacctccatctcctgggctcaggtgatcctcccaccacagcctcctgagtagctgggtttacaggcatgcgccaccatgcccggctaatttttgtctttttagtagagttggggcttcgccatgttggccaggccggtctcaaactcctggcctcaagtgatctacccacctcagcctcccaaagtgtgggattacatgtgtggcacctggcaaaacagaatgatttgatagagagtttctgaaggggcacactgtgcacataggtggctacatgtatatggtggttgtacttgcagatacagataagtccatgtttgaatcctgggtgcatatatttatccttgtttgtgcctatgtgtgcagatgggcagcttttatgcctagaatgtttgtatatttatatgtgattttatacaagtgagcgcacataggtgagttggtatgtggtttgcatatggggacacatgtgcttgggtatgtatatgttggcattcagccataaccggagacgttctgaagttcctgtggcacttgtcagtgagccagttaaggaaatggcttttctgcctctggcattcagggccgtttgccagcttcctctctccctgttctttcccactttagtaagctccctgtgtttggcttctctcatccctaggagggttaaagcctactgactcatcgagccaggaactggaaaaaggctgataatcttctgtgtgacctctgttagtaagaaaaggcctggcttccctgccagtccctgtccttcacactatgagggagagtcctgacttgaaatcagaagacctgagcatctattcttggctctgccacttattattgtgtgaccaataatctctctaggtttcagttacctccttcataagtgctctgtgcagtaaggaaggagaggggaagcaatggtctgtggtgctaagggagagccagatggtgctggtgtctgaaggaggagggagaatattctgagcaggggcaatgatgtggccaaaagcgtggaggtggacctgaacttgccaagggaaaccagggatccacttacagtaaaattcaaacttcttactattgcctacaaggctctacgtgatttggctgctgcctacctctcattcttacccaacttcttgctcactgaaatctagccatactgtctttctttctttctttgaaaaggtctcagtgccttttcacttgatgctccttttccccagaatactcttcccaagaattagtatgattgcctacctctcattattcaggtcttggctcaaatatcacctctccagagagaggccttccaggaccatcttatttaaagtagttgttccctaatatttatcaatatttaaaatgcacacatcagccaggcacggtggctcacgcctgtaatcccagtactttgggaggccagggcaggtggatcacctgacgtcaggagttcaagaccaacctgaccaacatggtgaaaccccatctctactaaaatgcaaaaattagccaggtgtggtggtgcacgcctgtaatcccagctactcaggagtctgaggcagaagaattgcctgaacccaggaggcggaggttgcagtgagccaagatcgcgccattttactccagcctgggcaacaggagcaaaactccatcttgggaaaaaaaaaaaaaaaaagcacacatctcttgaaccaacaggtccacttctggtaattcatcctacagatatacttgcaggtgagtaaagtgacataaaaataaaaatattcattgaagcatttatttgttaaataaattacagtacatacaaatagtggaatattttgcagctgagaaagataatgaaatagctctttaagcttggcaccgtggctcacacctgtaatcccaacactttggaaggaaggctgaggcaggaggattggaggatcacttgaggccaggagttccagactagcctgagcaacatagtaggatcctgtctttgcaaaaaaaaaaaaaaaaaaaaaaaggtagccagacatggtgactctggcctgtagtcccaactgctcaagaggcagaggtgggaggatcacttgagtctgggaggttgaggctgtagtgagctgtgatggtgccactgcaccccagcctgagtgacagagtgagaccctgtctcaaaaacaacaacaacaacaaataaaaaagagaaatagttctttaagtcttggtgaagaatgatatcaaggtatattgttaaatttgaaaaatcaagatgatcaatttctacacataagatttgtgcattttattgaatgcatataataattaacaaaagatacagaatagtgtgtattgtatgccatcatttgtgtagaaaaaatgagactatgtaaacaaatgcatgtagtatatatgcttgtctgacagacctgtcccttaagtagagcagttcttcctacccctgttaccctgtgcttgactggggactatgaggtgttcatctcttttctgaacaacattaaaatccttttttttttttttttgagacaaagtcttactctgtttcccaggctggagtgcagtggtgtgatcgccgctcgctgtagccttcaccttctgggttcaaatgatcctcccgccttagcctcccaagtagctgggactacaggcgtgcaccaccatgcccggctaatttttgtatttttagtagagatggggttttgccatgttggccaggctggtctcaaactcctgaccccaggtgatctgcctgccttggcctcccaaagtgctgggaatacaggtgtgagcctctgtgcctggccaaattttttttttttttttttttaaacagagtttcactcttgtcgcctaggctggagtgcgatggcacggtctcagcttgctgcaacctccatttcccggattcaagcgattctcctgcttcagcctcctgtaaaattcagttttttaacattcaattttcaaattttggtcttcaatgatatctcaagggtcttattaaagatcataatgatacagacttcttgcaaagtaattattttggtcattccacactagttgaattaccctagccctgtgtcctacaaagaatggtcctgtctgaatattgattgtttctggaaagtcacacagaatattggtaactgttttgccctgggcatggtggctcacgcctgtaatcccagcactttgagaggctgaagcagttttgcttgaggccaggagtttggagaccaccctggacaatatatcgagactctgcctctatgaaaaattttaaaataaaaaaattagccaggtgtggtagcatgtgcccgtagtcccagctactcaggaggctgaagtaagaggattgcttgagcccaggagttggaggctgcagtgagctatgattgtgcctctgtactccagcctatcaatagagtgagaccctgtctctaaaaaacaaatcacaaaacccaaactgtggtttgccagtaggcagggtgattgggagataggagtggggagaacacttctcattatgtatctttttatgtagtcccacttgtatgtattacttattcaaaaaaatcataaaattggaaaaaaaccactaagggaaacatttatttatttattttttgagacagggactcactctgttgtccaggctggagttcagtgacatgattacagctcactgcaggcttgacctccagggtacaagcgatcttcctgcctcaacctcctgagtagctgagactacaggtgtgcaccaccatgctcagctaattgaaaacgatttttttttttttagcaatgaggttttgctgtgttgctcagattggtcttgaactcctggtctcaggtgatcctcctgccttggcctcccaaagtgttgggattacaggcatgagccaagagatcttcccatctcatctttctgagtggctgggactataggtgcatgacaccacactcagctaaaattttttttttttttttttgagacagagtttcattcttgttgcccaggctggagtacagtggcacaatcttggcccactgcaacttccgcctcccagattcaagtgattctcctgcctcagcctcccgagtagctggcattacaagcatgcactaccacacccagctgatttttgtatttttagtagagacggggtttctccatgttggtcaggctggtcttgagctcctgacctcacgtgatccacctgcctcggcctcccaaagtgctgggattacaggtatgagccaccgtgcccagccggatccagctcaatgtttttagagatgcggtcttgctatgttgccaggctggtcttgaactcttggcctcaatagatgggcccactttggcctcctaaagtgttagaattacaggtgtgagccaccgtgcctgacccaagatagtatattttttaaaagtatttctccctagtcactcatttttatatcattctgctctatttataatgcttatcataatctgaaattatcctggttatatttgttatttgtttattacccacactatcattggaatataagctccatgatatcaggtatcttacttatgttgttcattggtgccttatttcttcttttttttgtttgtttgagacggagtcttactctgtcgcccaggctggagtgcagtggcgtgatcttggctcaccacaacctccacctcccttcaagctattctcctgcctcagcctcccaagtagctgggattacaggcgtgtgccaccacacccagctaatttttgtatttttagtagaggcatggtttcaccacattggccaggctggtctcaaactcctgacttcaggtcatctacctgcctcagtctcctagtgtgttgggattacaggaaagagccaccacgccccgcccattggtgccttatttctatacatgtagatagcacatagtagttgttgaataagcaaatgaatgcatgaaggaatgactgaagtaaaccaggctaaagcctaggaaggagtgggaggcaaggctgaggaggtagacagaaatcacctgataaaggatggcgattctcaaactttatttatttattcaagatggaaactcactctgtcatccagactggagtgcagtagtgtgatctcagctcactgcaacctctgcctcctgggttcaagggattctcgtgcctcagcctccccagtagctgggattacaggcacacaccaccacacccagctaatttttgtatttttagtagagacgcggtttcaccatgttggccaggctggtctcaaactcctgacctttgatctgtccaccttggccttccaaagtgctgggattacaggcgtgagccaccgcgcctggccaattctcaagaatcccctactaattccttgtaccatcttgtaataaagaagcagatccttggaccctgtgattctaattcagtatgtttgagctggggcccaggaatctacaaatcctctagatgatttaggcacaagtgatctggagaccctactctgaataatgcagtcttgatgcctcatcagaaggaatcacatctgtgatttcacttctccttaatacattactaggatggaagagaaggggccgtcactccatttcatcaaggatcagagatggacagtgcattttctaatgacatacaacatgtgtataaaatatcttgaatggccaaagtatctgacccgtcagctcaagattggtgatggcaagattgatggtgggcagatagctcatcctcatagaacagttccaggccttagtgtcactgaatggattttatgactctgcctgtttcttgtttggggaagaagttatacccctaatcactggttctttctggtatgtctcagggagggcaatgagccaggggagaccactcagatcacataccatcagcttctggtccaagtgtgtcagttcagcaatgttctccgaaaacagggtgagtgtgggggtgtgggaaaggactgggggtctggccttggggtatctgagtatctgagacttatggggagagggcaagggatggaaagaatttggtaacagaggaagagaacaggtcagctgggagggaggccagctggatgggagggagcaagtagcagcaagaagggttcatggttcatattctgtgcttttacctgcaggcattcagaagggggaccgagtggccatctacatgcctatgatcccagagcttgtggtggccatgctggcatgtgcccgcattggggctttgcactccattgtggtaggagtttgggctggtgaaaaggggcaggcgggggggtggggctctggagaagtaggttgggcctagatgatggagggtcttaaataacaaactaaggagcttagaaggtttgtgtcataggtccatattagttattcagtttcttctaggaccctggcttagagatcctgaaagttccatgagcaacccctttcttcattcactcaatccctggggctttcttctctccctcagactttcttcccttccctagtttgcaggcttctcttcagagtctctatgtgaacggatcttggattccagctgcagtcttctcatcactacaggtgactaattctctcacctcttctccagaaccccccatacctcaagccttggtctccaatcagctcattggtatttggggctactcagcatagagggtagagactgcctgccttttctctcctggtcccacctcagctgaccctctgtcagctcgaatcagctggaagagccagagttaagaggcctactcaggaagggccctatggacattgtgcccactaggcagcatggggcttactaaggcctggaatgtctgttgctccccaaagatgccttctacaggggggaaaagcttgtgaacctgaaggagctggctgacgaggccctgcagaagtgtcaggagaagtaagtgtgtttggctactgtctgagttgactgagcctttccccagtgccaggttccctttgtcccctctaccctaaatggacatgggtgggtcttgccaagttccctttgagccaacaaggctaccactttaggcttttctcttctccaggggtttcccagtaagatgctgcattgtggtcaagcacctggggcgggcagagctcggcatgggtgactccaccagccagtcccccccaattaagaggtcatgcccagatgtgcaggtgagtctggcactgctatgcctttctccaggctcaaattccttcacttttcctgcctagaaaattcttgatgtccttctttgcctgctcatcagtatactgaggatccaggagcaattctaggaatgcctcctctagcagggctaggtgggaactggaagactttgaccttgactgtgggtagagaggcccttgtaccttgagaacatagcacaagcgattgtaagggagactcctatgctggttggggtatccttgtgggcacaggggatcctcagggcctaggcttgtgttagaaatgtctaacttgagtgacaatatatagtcatctccattactaggctgtgatgtggggtgggctatctttgtggcctaagggatgcccaccttggaaggaccagagtccagccctcacaatatggcctttgttagctttggacccccaggcttctggtgggaatggtagaaatgcccagtgatggcctccaggctgagcagcatgagggatcaaagttctggggttgagtaagagtctgtgacttgaggctccctgaggggtcttagggctagagaggctgtagtctagtttagggaagttggaaagcccaatcagtgttaggggttttacatatataggggctggaatcaggatcaggaaaatggaagctgggaggaccagtgagaagggagtttggggtttatgacacactgaccctttcctcccactccctgtatacttggaccctcctcactacccttttcatcctgggctcttaacagggtaaactgaaagagaaatccaagcgtgttcagccccaggtatccatttctgcactgccgtgggcaccgcttctctgtttgcttgtctgtgtgctcatctgccctttgcctgtttgccccattgaggtggctgccagacctaacctccttccccttgcccctgggcaacttgacatctaagccactgaagggtggtgaaattaaatgtccgttactgcctctgtgaattggtatagagtatggatcttagagaggtaacagcagaacacattttatcctgatactcaggacctttgtgggagaggggacaaggtaacctgtcagaaaacatttactgtgcaggtagctggagcagagccgagagacaggaggaggaggaggtggaggaggttcagaccctgactttgggaattcactgtcaagttggggagttagacatgtattattaatacaaaggaaaatctaagttttatacaggacagcagaggagattcctaaatacatttatatagtgctttgggatttataaactgcatataactttgtaatatgattaagtgctaaactgaacaaaagtcatattgtaggtggttctaagaagggagatccataagggggtgctcaaagcagattagtatcgaggaaagagtgggcctgaagtccagagaccaatttttagctgtatgaccttgagtaagtcaattctcccctctgggattcagtttccttatcagtaatggagagatgataacacatgttataaaaggaaacagcttcccttcctaaaacaacacataaagctcactattcctctggattttaccatcttcacagggtgtcttactctaaatctgctatgattaacctcttaggccaatggtagatataagccccttttctctattctcattagcatggcggagacagatctgattcctagggcatactgctttccttttaaaactcaggcaggacctacaccctttcttttgaaagaggtgacaaacttagtggcttaaattgtaatctctggagccagattacttgggttcaaatcctggctctgccatctgctgctgtgtaaacttgaacaaattacttaagctctctcgcttgtttctccatctgtaagataaggataataattatacctatgttatcgggttttgtcaatatatgtaaggtgtttggcacatagtaactactcaataaatgttagctgttttttccttccccttaatgcaacagacagattggcatttctaaaacagagaccagaaaagaaataacaaactcttgtaattcttaataccagagaccttcaggccaaaggctactggatttttgtttcttggaggtgaaaataaccagtttccaaaataccaaagagcataaaaataggcttaaaaagtccaggttgttggtctgagaattgcagtcaaagctgcaaaaatctttctgacaatgggccccatatttaaaaattaaaaaatagttttcaaaagagctgcaaaaatcctggcagggctccaaacccctttatccttaaacaatcttccagggagatcctggcagggtttgcagggaccctcctcaaccatatcgtctatgagctccctcatattcctctcccgtacatggcagctgccctccttgagactatcctggtccaaggacaaaggccaactcctcaattcttattttagaaaattcagaccttttcctggtgcagagcctggggcctcataggcacacacctaattcacaatcaaaggttgctttgctaattgagttcactctgcttcctggtgctagttatcagttccacacctggagtactctgacccctccacctctatatacacacccacccacaaaagaaataataagattataagagtgccctcattgcagagccacagttgtaactatgccttgtccttacatgtacttagtgcctgttctgtggcagttcacagtgctgtagaccagcaccatttgtccaaagcagtattgatacttctggttgaataccttagtgcccccatctcaagtgatcatttggcaggaaaaaaagtacccatgtgacaatgtatgtgtagatgcatatggatagaccaaatcaggtgtgttcttatgttttctaaccgtaggcagctttctctctcttcttcctttttctaggcttgtcgtttttatgatgttgataatccagaaatttcaaattctctaccataaggggcaggtggtacagaaagaacggagtggttagagagtcattttctaatttatcaagctatatatctaacactccagaagtttttttaaccaaatatgcacacaacaaattagcatatatccttataatgggagaatggcatttatcttacaccatcatgtctacctgccagccagggccattgaacatacaagaatctaattaatatgaaaggactttgtgacagctaaagcaaaccccaaacagttcctatcatcacactcttaagtttttgtgggttttttttgttgtttttgtttttgtttttgttttttgagatggagtctcactctgtcgctcaggctgaagtacagtggtacgatctcggcttactgcaacttctgcttcctggtttcaagtgattctcctgcctcaccctcccaagtagctgggattacaggtgtctaccaccacgcctggctactttttgtatttttagtagagatgaggtttcaccatgttggccaggctggtcttgaactcactcctcacctcaggtgatctgcccactttggcctcccaaagtgctgggattacaggcgtgagccaccgcgcccagccccacactcttaagtttaactcccagtagtcactgaactaacctctgtctctcctgacattcatcagtcttcctcatctcaccccaacctctacccttggggcaatccaaggcttgatgtttactagataatacttttttcttttggtgtttaccacatcctgtgagtctgttaaggcaagaatgactgtcctcatttgtaaaaggagagacttaaggtaaagtgatttgcccaaggtcatatagctaggaagtggcagaactggtattgaagtacactgaagattttggacaaattcaagggatctaacttcattcagcagatggtagactcaaaattggtgttcaaagaggtgatatagacagaaaagtaaaacagtttcaaaggagaatttagagaagtttcaggatgacagatccagaagtaattatcaaaggcatagggggacatccttctactgggagaagtccaccttggtccttcttcaccaacttgaagcaaagcttcctgctgaatggaacctgtcccctcaagcaaaagtctctatgggaaaccctattggtaccagtggtgtaaaggcaggagcagagctagggtaggaaacacgcagatgtggattgggtctggacatgtaggcaaaagtgcttggaccaagatctgttgacttattttactactaacagggtcaggtgcccacctcacctgtaagctctgactaattttgcatttctgaattgtgtggtgtccgcatccctgctaatgagcctagtcccataagtacatatgtatgtatgtagacctgtgtgtgcatagtcattcatccaacaaaaattgactgagtgccaggcactttgctaggtgttgggagatatggcaggggtcgggaggaaagacatttcacctccttcatagatgtcgctatctagatggggagacagtaatcaagtagacaactaaacaaaataacaggaaatatgtactgtgtgggaaagaaacatggtgttgtgatcaataataatagcagggttgggggtagcaatctatcagatactgttcaggtaaaggctttccaagaaggtgacatttcagctcagaattgaaggatgggaagggaccagccaagggttcctcctcagcctgaggccaggtgagaggagttctggggtagagatgggggtaggatggcagggtggttggagtactcagtaagcttgggttctgctcctgttctttctgttccattccatccttgaagggccttctctcccttcctgtactcctacctgcctgtcccacctcattccctccaggggcaaggtacgggtgtatcttgtccccatcttgagctgttcacagttcttccctgcccatccctgcagatctcatggaaccaagggattgacttgtggtggcatgagctcatgcaagaggcaggggatgagtgtgagcccgagtggtgtgatgccgaggacccactcttcatcctgtacaccagtggctccacaggcaaacccaaggcaagtgtgtgtgtgtgtgtgtgtgtgtgtgtgtgtgtgtgtgtgtgtattatgtaggggtaagaagtaagtttctgaggaaacaagtaatgaaattatttttttcctacaaccctgagttttggaaatgtagcattgtcttttctaaatcaaattaagacataaatcctcaatctataggtggtgaggcccagggtgagacagttcaggtggagggttttcatacagctgacatggatgttctttccctatgcacccatggtttggttgaaggagagctattctgttaactcaaggccaagggtgggcacagagatccctctcaggcttctaagaccataactcttagagttcaattccttccacctggcacactattaacatgtagtcctctgccagcacacaccatgggagccggaaacacttaagaaaactgtttcttccattgacttgaaagctatgtcactctaccttctgcccactccacccctaaattatctccatatgctttggaatatccctcaataagtctttagaaacacaattttggcctctctttcatagagatgggggtagggatggaataagcaaagggaattatcttttttttcccactcactctgatggtgtgtaattgagtgtgtgggcacaaatacacaacagagggactattatgagtgtgctatgagtgctcatgtgtgagtgatgtgggtggctctgaaataccatctgagggtgctggtatgaatgatggcctgatagacatatgtgtcatcaggagtgtgataaaggagatgagatgggagcatggagaaaaggagatggaagggagatggatgctgtgaaaagggtgctggcagggctggaatccctgaggaggatcttcctccagctctgcccagcctccatttggtggtcagtaggggtgggcataagaccctaacctgttccccattcttcccacagggtgtggttcacacagttgggggctacatgctctatgtagccacaaccttcaagtatgtgtttgacttccatgcagaggatgtgttctggtgcacggcagacattggttggatcactggtcattcctacgtcacctatgggccactggccaatggtgccaccagtgttttggtgagaagggagccacctggcctagctgggggatggacaagattatcctgggtgactacctcccaaggctgcttggtctagagggagggggacttatacaatcatctgttttctggagaaagagaagtcctgagggggttgcgtatcctgactaggatggtatcttggcttgtctggccagggagtgaagatatggttggtcagaaagggcaaaatactgaacctgagggaatggtagggggatgaatagaaggactattaggaaagactgggaatgaccagccttcatgggtcagtttgaggggattcccacatatccggacgtgaaccgcctgtggagcattgtggacaaatacaaggtgaccaagttctacacagcacccacagccatccgtctgctcatgaagtttggagatgagcctgtcaccaagtgagacctcttcccagttgctgccctgtgggtatccctcagagctgggtgctggcctttgtacagtctcttcttttccattgtcccaactctctgacctggaatagaggatggggcaagagaaaagcctgggtatgtgtgtcttccagtagtactcagagccttcctctctcccattcccctgccccaggcatagccgggcatccttgcaggtgttaggcacagtgggtgaacccatcaaccctgaggcctggctatggtaccaccgggtggtaggtgcccagcgctgccccatcgtggacaccttctggcaaacagagacagtgagtgaagggtacagaaggctggggcccagggacaatgtgggaagattgactcaaatttctcatctctgacttccccagggtggccacatgttgactccccttcctggtgccacacccatgaaacccggttctgctgtgagtgatgcttccctggctggtcttgggctaggcagggatggtgtcttggggcacttggcctagttagatagtggagaactggactgacatgtgtgaagaatttggggttctggggccccttgggagttgagtcagagttgcctcattcctcttcttgggttctgtctcccgtttgcttctagactttcccattctttggtgtagctcctgcaatcctgaatgagtccggggaagagttggaaggtgaagctgaaggttatctggtgaggccctggcccttgggagtctttaaggagagagggaaagggtctgccaagggtactttgctttagagttaataacctaatctctcctggtagctgcttaggactgaaacttcatggttggaggtttgctcactgagagaccctggaggggaccctcgatactttgcctgcatctcttccttttgggccataagtctcctaagggcgttttaagagttgctcagattcctgatggtacctttttgggtctggaagactaagtcccatcttcttttgacaaagattctacagaaaggaggctttataacatagtagaaaatcacgtaggatctggagtcaccctgcctgggttcgaatcctagctctgcctcttctgtgacctcagataagttatttaacacctctgaatctacattttctaatttgtaaaatagggttaaagtggtgtctctggccgggcacggtggctcacacctgtaatcctagcactttgggaggctgaggtgggcggatcacctgaggccaggagtgcaagaccagcctggccaacatggtgaaaccccgtctttaccaaaaatacaaaaagtaactgggcgtggtggtggacgtctgtaatcccagctacacgggaggctgagacaggagaatcacttgaaccggggaggtggaggttgtattgagccgaaattgtgccattgcacttcatcctgggcaacaagagcaaaattccgtctcagaaaaaaataatgcctttgtctcctatggttgcttgcttgattgagttagataatccacatgaaggggttagcagagaaactaacaattagtacttgataaacattagctgttgtgattattgtattcatacttgcaggagcctcacctgtcccttcaaccccaccccatttcactttcccaagagcaagttagtaacagggacagggcttacatccaggccttctgactcagcctagaattccatccattccatcgatctgctgccaaagaatgttactgattgggcaataattatttacttggtgtgtgggcaccactgttttttaaatgagtgttttcatttgtatcaaactggacctgctttcctcaaggattgcccaaaaggagacacaaatttactaaacacttatcaataatagaacaccgtgctaggcaatttccatatactattaatttaatcctcacaataactttggaagacagaaagtattttctctgatttacagatgaggatcctgaagctcagaggggtaaagttacttctctgaggtcacctagctagtaagtggtagagctgggattccaagccaggatcctctgtctccaaagcctgtacttcattcaggacactttcccccacatttagaaaagctgtaattatcttccagtgagacagcatagcaaatgtgatcactgtcccttcctcactccccaggtgttcaagcagccctggccagggatcatgcgcacagtctatgggaaccacgaacgctttgagacaacctactttaagaagtttcctggatactatgttacaggagatggtgagccttagctatccccctcttgcacctcccactaagacatgtaccttccacttccattttcaggaagagttggtgtgttgctataaaataatacctgagactgggtgatttataaagaaaagaggtttattttggatcatcattcttcaggctgtgcaggaagcatggtgctggcatctgcctatggtgaggcctcaggtagcttccaatcacggcagaaagcaaagggaaagccagtgtttgacatggcaagagaggaagcaagggagagagggaggagataccagcctcttttaaacaaccagatcttacatgaactcatagagttactgcaagtacagcaccaagccattcatgagggatctgtcccccccgccccccccacctccccggccttgaccaaaacacctcccaccaggccccacctctaacactggggatcatatttcaacatgagatttggaagggacaaacatccaaactatatcagttggttaggggtaaagaaaattagagaagaatgtgtcctacatgtcagtatctggtttctacgcagagctacaaagactgtaagggcaggaatgagtatagcaggaggggtctcagaatggtgccatccgaactttgatgtatgaggaaagatggacaatgtatgctcctgtgttgaaagagatggggcatgtggcagtgcatgactattatgtcatgtttgtctttatgtctggagtctgtgtttctccatctatccatctaccaatccattcatccataagatctgagcactgtgatcctgtgcccaggcactgatcatgaataatgtagtcaaaatctcctccctcatggggattctagtaaggggagacagacaaacccaacaaacataaataagcttatcttagatagagataaatgctgttaagaaaaataaacagggtagcatgatagtgtgtgcagggatggctactgtacacaggatcgtcggagaagacttctctgaattgacatttgagcagaggcctgaagggtgagaaggaaacaggcatgggaaaatctagagtaagagtgttttgtgcagagggacacagcttgagatgtctgaagaatggactgaagcctgtgtggctggagcgtagcaagcaaagggaagaatattacatgacgttggagacgtacataatacagggagggtcttgtgggccatggtgaggagtttgaattttattcaaagtacagtgggaaaccttttttttgttgttgttgttgttgttgtttgttttttttttgagacagaatctcactctgtcacccaggctggagtgcggtggcacgacctcagctcactgcaacctccacctcccgggttcaagcaattctcctgcctcagcttctcaagtagctgggattacaggcgggtgccaccatgcctggctaatttttgtatttttagtagagacggggtttcaccatgttggccatgttggtctcgaactcctgatccacccaccttggcctcccaaagtgctgggattacaggcatgagccaccatgcctggccaccttttggggttttaagcaggggagtgctaagaattgatttactgtttagaaaataactttgctggatttatggagaatagagtttaggtgagtatactattggcatggaacaaattatcccaaaagttggcagcttaaaataacaaatattatctcacacagtttctgaggatcaggagtctgtgaacagtttcactgggtagttctcattctgggtctcttgtgagtttcagtcaagctgttggtagggcctgtagtcatctgaaggtttgagtgagcctggaggacctacgttcatgcttactcgcatggttgttagcaggaatcctcagttcctcacctcaccataggactactcaatacatggcagctagcttaccctacagcaaatgatctgagacaatgcaaccgagacaagctaggtgtcttctacaacctaatctcagaagtgacatcctatcacttctgccaaatcctatgatgacacagactaaccctagtacaatgagaaagaggactgcagggctatgaataccaagaggcagagatcagtggtgccctcttggaggctggctactacagtgggcaagagtggaagcaggaagacttgttagaaggctattgcagaaggtgtagcagtttggtaatgtggatcaggtatcctaccgtagggtttttatttattaggttttgcatttcttcccaggctgccagcgggaccaggatggctattactggatcactggcaggattgatgacatgctcaatgtatctggtgagggccaggggccaccttcccatcttattaactctgctcctctgacaacacccagccgaagccttccgcaagagcccaggagtgtcctttggccagaccatgtactaagtgtagcattcagttctgggcccaggttttagaggagtaatgaacactggaatgtgcctagagtaggggaacttggatggtggggtgactgaaagcatgtcatctgaggagtgaatgaagggtcttctccatttggccagaccaggactgccccatgggtacagatggagcatgggctggggcagagcctgggatctctctcatggcacttcctttcccttgacaaggacacctgctgagtacagcagaggtggagtcagcacttgtggaacatgaggctgttgcagaggcagctgtggtgggccaccctcatcctgtgaagggtgaatgcctctactgctttgtcaccttgtgtgatggccacaccttcagccccaagctcaccgaggagctcaagaagcagagtaaggagcctccctgggcagggactatagggtctgtcttggaggcccagttatcactgcaagttgttggggaggggctagagcaagctgctccccaaaccacaaacagattccagggggccccatgggctgattgccctcttcctgttcagtctccactagtctcccactaggataataataatagccaacatttctagaatactttgtgccaccgctaggctaagtgctttaaatgaattaccccacttaatccctagagtcacctccatgaaacagatcttattgttaccttcatgctaaagatgatgaaactgagactcatggaagttaaatcacttgcccaaggccacactgctagaaaggtggcatttaaactctagcaggctcattctacagcctgagttccataagataaaatgagagagtaaagagacaagtgtgttgagagcaagagaagcagtgaacctgaggctgtctctgtgggcagggacttgaggaggaaacaggtggggaacaaagccatctctactttgatttttgaaaagtctggctaagggtgctgaagaaatgcttgatgatttgttggttacagttagagaaaagattggccccattgccacaccagactacatccagaatgcacctggcttgcctaaaacccgctcaggtatgttcagaggcctccatggattgggatgggctgaggcctggtggtggtggggtgtgcgtggatgaaagcctttggcagggctagggtgggtcagtgctttcaccaagtaactagaggtctgtggttccccagggaaaatcatgaggcgagtgcttcggaagattgctcagaatgaccatgacctcggggacatgtctactgtggctgacccatctgtcatcagtcacctcttcagccaccgctgcctgaccatccagtgaacatgatcctgacctttacctaggattcctcctgctccaaactttgcccatcctctttgccccctcaggagtgctgagggccagtgttgacccacactaccctcccttgaccagctgtctgggaccggaaaccagctttgtctccaggtagagacaacatcctgtgactgccaggcagaaaggacagggcccaggtcagcctcagtctgctgtgcctccagactgcagagctctcagaacccagaacagagacgaaaaggctacctctcctacccaagttaagtgttcaaaggggatgtgagggcctccactgaagcagggaggcagctgtgtaatcctatgtcagctctcttaggaagccccagtacttatattgggcatgcacttgcccttaaaaacaatgatttgtgagtccaggaacaatttactatttttaaaatattttgctgcttctgttctgggtctgaattcccttttgtgccagatgccagtactgtctgcccattggctccaggggctgtatgggcagattcagtctccagagggtattcagatcatctgcttctttgaaggagtaaatgtgttttgttcctagggccagaggagcttgtcttccttgtcctctgttcccaccctcccctgaacagaacccagcccataagagacattctcagatgaaactctgttttcttgccccagtcaggctcaagccctgtggttgtaggaataaagcctgtgatctcaagaagtggtgacttgttttcttaggtatctgtgccctgaggctgtatattcattagtggctctgatttgtgtggcagatgggaagggaggggtatttcctaggactatccccaatatcttccttctagaacttttggtttgggcagagcgaaggaggcttcactgacagggcctttgacaagcccctgagctaagcaggaaagtgactgaagccagttcacaactgttatgtatgtcccatcttggttgccttccctcctgggctcctgccagggactctcattcctccctgtgatccagtaagagcattagtgggtggctaaggattgaaacttcagggttccacctgtagagactggtctagggggaccctgattacagaccagtcacttccctgctctaatacatcttaagtgggctaacgtagattacagctcccgcctcccctctatgcacgaagtaaggaatcatcactgaatcagcaatgcagttttatttaaggcagaattagggaaaggctatgcccctccactccccctcctcctaccactcagtcctatcccaagtcaggcactggaacctgctgaaaaggctgatgaggggctgacaggagtggggcagggttcatggacctttacctcagagcagcttaccctgagctatacccacatctcaaggatttgggggcgtctagatctcatctaagggagacacaacttttctggtcctcagatggaaagctgggggaaggtaccagtatttacccttccataaaaactttggaggtctttaggaggatacccctcaggagggctaggagaggaatgacaaatacagaggatagaaggtcccgtggcctggttgtgccctcacacagggtatgggttgtccaggactgccactcccgctgccacaccaccatctgcatgctcgatggctttggttcgaagtagatgccccacgtgcttgttcatcacgagtgtcttttcctgcctatagaaatggaggcaggggacacacatcacctggactcagccccaaacccaggaccttccctggacccagctgagcagtacctgggtaactgtctataccaagaaagtgctaggattttagagtctctatgcctctctggagtctccttctagtcctaggttgtcaaaccatgtgttctgagtcctcttggtgctatttggagtttccttcacggttgcaaaggacttctcatcagggcttcatctgataccctggtaaggtgggcaggtcttgggtccttggcctcatttaatagataaagaaacaggtaataaagctagtgattggcagagctggcaccgaagcccaggattcctgactctttccagtgttcccctctaggctggctcacttggctggcactcttgcaagcaggtagtggaaagagcttctcctgattggctcacctgacatagaccccaaagatgcccagctctgaaatgcactggaccactcgggcagggctgccaggccgtagcaggcaattctcaaaaggctcaggttcgatcttctccatgaggatgtaggaggccctctcctcactgtccttcagctgtttcagggcctgtaccatttcctccccatataggttgttacctgcaatgaaactggccagtcaccctggaccctctgcctacctcctccatcccatgccctcacttttggggccacatgggcaagtcagcagcctcagttcctggcacccgctcagtgaagccagggcatatctggcttctcaggagggaagctcactttgacaggagagcccttactcatgcagtgaacacatcttccactacactgttctgccctggttctcctcctacctacagctgttccttctcaagctccattgctggctccttctcttaaatgctggggtcccaggggaattggtcctccacgcttgctctctcccccatgtacattttcccaaggagatctctcctattcctgagtctccatctataccctaaaaattgttaacttccggccgggcatggtggctcacgcctgtaatcccagcactttgggaggccgaggcaggcagatcatgaggtcaagagattgagaccatcctggccaatatgatgaaaccccatctctactaaaaatacaaaaattagctgggtgtggtggcgcacacctgtagtcccagctactcaggaggctgaggcaggagaatcgcttgaacctgggaggcagtggttgcagtgagccaagatcatgccactgcactccagcctggtgacagagcgagaatccgtctcaaaaaaaaaaaaaaaattgttaacttccaaatatttaatgcaggctccctgcttagacatcatatgactggcccccaaacaaactcaacttgtccaagcagaacttattacttctgcctgaacctgcccctcctggaccttcctactcccaatcaggcaaaaggtacccctgagtcatatttaactcctcccttccactaccctctcactatctaggacatgtctctccagttggccccatagtcatagccctagcccaggcctctacgttgctcttctgaacaactgtatcagcctcttccacggtctttctgcttccagtgtctcccctcattccaggacatcttctacaatgcagaaactgtaagttttgcaagttcccaccactgctaaccacttgagtcctggatcaatgtgtcccttcctggcttaaaactccctaatggcttcccactgcccttaagataaaatccaatttctcagtatatattcaaggccctttataatcaggatgcaaaccatttttccagcctaaatccctgtcccctcccagctccccctccagcctcaccagtttctcattaacctccaaacatctcacactttcatggcccggtgccttggcttgaggttgtcccttttgtatggaacactcttcctcctttccacctgggaaattcctacccacctcttaagacaaagattaaaaaaatcctctcctctggagaggcagacatgacccctgacctcaaggagtttcaaactagaaaggaaaacagacatgtattctctccagtctcctaatatgaccctactctacttcccaacaatctacccacaggcacctcaggtaaaacttgtccaaacccttcaatgctggttaatcagattcccctgtgctcccggacttggtcacagggtcttaggggacactgtccaacatgtggcctgtgtcagttccaatagtttcccccatgcccgggactgtgcccagagtaagtgccaatgagcactggccacagcctgctagtccctctcattgaggagccctgcaaagggagatccacctacctccaccctctctctggggctttagcacaaaccggctaggggcagcaagggcctcggcgatggcctggtccccttcttcaccctggcaggaggcagaaagcagttatcaaaagtttaaaggctaaagaggcaagaagcttaggtccagctggttatgcagagcagcatcagaggaagagcaggagggagaacagccacaaattccttcaggcaggatgctactatctggatgacactcccaacaaaccccctgcagcagccgatgcaatgagaacaggcctttctttagcaacagctcagggctctgcagcaggcagcctgatacacttctcaattcttgccacctgccttagtcccttccctctggttgccatcctcatctctacctttgctgagggagcttacaatggattccagcccccatccttccattatgaggctgcccttctgctcagagttctaggggttctccagagcatcaccaaccttgccagctccaccttccccttgtcacaatgccagctccaccctccccaacacattgggctgtaggtctctgccacctaggaggcctgtggtaggagaaacaggctgcccacgtaccacatccagtgagtagaggccagcaaaggtggcgcggaggcgggccacagcctcaggctggccagggagcaacatctccagcatgcccggcctgcttagctcctgctgcaccttcttagtcccagccagctgggtggcaatgtctgggcacttggcagcatgtgacctctccagcagtagacgtgcttcccaattctgcagagggaagaagacaaaaggaattcgactttattttacttcagctgacgtttactgaacatccatccattaggtgccaggtatcatgatttgtatcttcaccctcattatcacccaggatcattctaacatccttgtgagccaggtgtgatatgttgtagttatgtatcattgtgccagactgtgagcccctgcaaaggcaagaatcccccaatctgtgggaaacaatagaaggtgtaagggtagaacatttgtctacgtgctcagcttcccactgtgttccatactccctaccatggccttcaagatccttcaggagctggctcctgtctactttttcaaccttgtaccatccctgactcctagtctctgccattctactcacacaggcctgtcattcctcaaatcacaaagctctttccctcctcagggcctgcactgcttttccctcaacctgaaacccccttcctttcggcttttcccatgcatagctggatccttaccatccttacatctcagctcaatgtcaccttttcagagaaggcttccctgtccactctatttaatgtggatttcccataattctctttttacccagttgtttcattgaaagcagttacctgagactaaaacacacacatgcacacatacacgcacacgcacacaaacatacacacacaaatcccaatttttttttcctatttttgtttactttttttttcttttgagacgtgggtcttgctctgtcacccagactggagtgcaacagcgcaatcttggctcactgcaacttctacctcctgggctcaagtgatcctccctcctcagcctcccaagtagctgggactacaggtgcacgccaccacacccagctaatttttgtattatttgtagagatggggttttgccatgttgcccaggctggtcttgaactcctgagctcatgcaatccacctacctaggcctcccaaagtgctgggattacaggtacgagccacagtaaatggccatatttttgtttactttctgatgcccatttctctgaccagactgtgagctccatagcacagggctcttatcattttcctcattttctgttgtatctccagtgtctaacacagttcctggcactttgtagttgctcaataaatatttgttgttgttgctgaataagttgaaatttgagtggggttctgaaggacaggtagagcctgacaagtgagactcaatagggaagggatactcaggctaagagaataatatgaacacaggtctcaagtggatgatcacaggatgaatggtttattaccacaagagctgagggtataaaaggcaaggaaacagcaggggatcatgcctcccaactctggttcccattctcatgcaatggggagacagtctgtccttggctccagaccactgcaaactgcacacagcaggatcaggtctctcctgtgacccccacccaatgctgtccttcctttgatactactggtccacctgtagcaccttgacctgatcttcatcaataaccccaggaacccaactactagtctggcattccacgcagaatcacacgtgaccagaacatcagaaataaacccagagaaataccccattatggtagaagcaggaaagcaaaaccaaagataagcaaggacttgcccagggtcatctagtaagtcactaagccttctagatctctctccatgtctaaacctgctctgagctgctcagttccctaaaaatgtctacctcttggccaggtgtggtggctaacacctgtaatcccagcactttgggaggccaaggtgggtggatcgtaaggtcaggagttcgagaccagcctggccaacatggtgaaaccctgtctctattaaaaatacaaaaattagctgggtgtggtggtgggtgcctgtaatcccagctactcaggaggccgaggcaggagaatcgcttgaaactggaagtcaaaggttgcagtgagccgagatcgcaccactgtactccagcctggtcaacaagagcaaaactctgtctcaaaaaaaaaaaaaagtctacctctttaaacactactttccttccttgttatctcaaactcttctaagttttctttgtcgtgttttgaaatctagacccatttcttttttttttttttgagacagagtctcgctctgtcagccaggctggagtgcagtggcatgatctcaacttactgcaacctctgcctcccgggctcaagcaattctcctgcctcagcgtcctgagtagctgggattacaggggtatgccaccacgcccggctaatttttgtatttttagtagagacggggtttcaccatgttggccaggctggtcttgaactcctgacctcaggtaatccacctgccttggcctcccaaagtgctgggattataggcgtgaaccaccgtgcccggcctagacctatttttctaatagacagtttatctctcctgtagtcagcaagttgccaccactgctaaccacctatctaaagaaaaggatgttctatcgagataccacctctatagagcctcctcatgtggagctcaaccctcggggggagtcctagatgaattacagacctagaaggagccccctcagttttctagtgtagctccccccgctcatagaaacagacctagaaagggtcaggaacttgcccatcatcacacagaggcagtcaagctcatgacctccagctcactgcccatggtatttctaaacttatttcctcctttatcatctcccagctgagagcagagcttcttagcctctccatgatgtggatgttaggagcagaggagaagaatgggaataccatcggcctgaaagtcagaaaacctgggaacttcctgtagggccttagagaagcctctccatctctctaaacgttagtttctccatctgtataatggggataattatatgcctcaccgagtggttgtgagggttaaatgaaataatggatgtggaaactaatgaaactacatggtaggatagcaaaatgaggtgatataactgtcattaacatgaatgaggagatgataaaactttctgattcagataaaggaaaggtaagagttggcaggaaaaaaaatggtcagcagtatgctggaactggcttatatcaaccagtgagagctgattgttgttaaacatttgccagcacatctctggaaacagtgtaaatggctgaagctctgtggattcctgaggattcaaattctagaagactgtgtagagtgataggtagcaaaaggcttgagggaggataggaggttctagcagcaagctccctgagaaagaagtgaagtgaggactcggaaaacccaggttgttataagcctgaattgggtctctgtggagctcttgtgggtcccaggaggcaaagaatggtctcacagaaaataccaacctgtagactgtactgacgaggcatgtagccatcccggaagtaaaccacagcaatttcctggccatccctggaacacaggatggagaaggctgctgtgttaaattataactgatttgttcagtggttcaatctatttcagggtgcatcaagatgaatttggctttttcaaaattcagcccacagtgggagcctggtcaggggttcactggaaccagtgaaagtagatatccacactaccagggcttccactgaaaacagggaggtgtgccatacagaatactttagaatatgccagatttagagtcattctaagaaggccagaaggaacaagaaggtcactagaatcaaatttggtaaatgcatacaaatgttggctcgaaattaccgagcagcagaatcatactgccatgtgtagtaaaacacactttatatttccactgcttaaagcagctgaaaccagaatgaaaaaatttttaatggcaggggtgaaggtgaaaacgcaaacatgtaaaatgatgagtctgattaagacacaggctttttaaatgtcttttccttttctttgacctatttgatattgtctagtttatctgaaaagtaaattaactactttgtttagttatgataaaagcacattttgaaaaacagtgagtggtattgtgaaattccatggacagttttaattttaacaatcacaaaggtctaggtctaaatatatgtgctgcaatgctacccaaatatgtagcaccaaatctacctggtggtggcccctagagaaaaggataaggcttggcttggaacacaaatccaggctcgagctcagacagtggcatccagaccaatcacagcatgagccagctgctcctcttcctccctgactgcccagctcagcttctcaggcctgacctcaccttactaggagaggcaagaaaacttttgggaacttagggcatatgaaaactaagatgatctctaaggagaccctgatccagaatgtcaacagctctgatagaagcacagcgtggctggctttctccaaaatttcctgggaggatgagatatttcaggaattatgagagaaggaagcaagccatcacatctcccagaagaaagaatcattttggggaagagggtggcaggatgagtttcataaaccagccttccactggattcttgggaatgcttacacaaacagccttcggtcttggtccagagaccccttttcagagatatcttcaaatgttcgtcggatcacatggatgttcctgggaaaaatgggcaagagccagagggaatggatgctatgttctgagtgccccacccctaatcctggagccacacctagaagtcccccttcctttacttacctggccagtagctcattctctatggcacgctggtcaaatatgtttctttccttctcttgagcaatcagtagcaccagagcactggggaaagagcacaggtggcccgaggctactatagaacttgttcttcttttgtttctcccctcaacccccataccgccccacctcctggaataagaataagaacaccgcttccctgaaagaacagatgttccctctctcaggaaccttgagattacctcaggcatagacacctgatgctatcacatatgatttcctgaaaatagaaaacttcaaaaatgaagatgcctctgacccttctccagtgggcagatgaaatattgtaatgatgtcatgggttgatgaatttctgtgcaaattaaaatttagatttaaaaccatctcaaaaacccaagaggactttttcttagaacttaacataattctaaaatctttctggaagaataaacaagtgggagtattgaggaacattttgtaaaagaacaatgcagggggtccggggctaatggctctattactagattgtaaaggatacaataaaggaatgtggttcttacacaagatggaaccctacagaaacccacagggccaactacaaacaacgacattatctcctgggccctcccaagattcctataatgtacacagggccacatttgatctcatagtattaatgagatcactagggcttatgtggcttcttcctctctgattattcatgtatttcttaaagaggcaggggcttgagggctcagggaaaagcttatgccagggaactatctgtttggctgccagctaacatatttccgttgtcaaagataggtccagtcccctaagagattcctagggctaatgctcagcagtaccaaactgcattttttttcttttacattttattttatttatttttttgagacggagtctccccctgttgcccaggctggagtgcagtggcacaatctaggctcactgcaacctccaccccctgggttccagcgattctcctgcttcagcctcccgggtagctgggatttcaggtgtgcaccacccccgccggctaatttttgtagtttgagtagagatggggtttcaccatgttggccaggctgggctcgaactcctgacctcaggtgatctgcccgcctcggcctcccaaagtgttagcattacaggtgtgagccactgcgctcagcctccaaactccatttttgctgtgactgtactgctttgtgtctgtggcttcttcctgagacccatggaaccctaggctttggcttaggattctaagtgtgtattccctgacctcctctgcttagcctctcttgtctatctctgcttctcctgaccttggctgaacctcttagtctaaactctgtttgcctgactcctttctgcttagccaaaatataggtcttagtaagtcccctctcctggtttgcctgaaatctcatgaggtcagatgtgatgttaagctgagtcttggctttgagttgggtgcctgagagacaaactaaaagtggtgctctcacaagtcatcttgccctgagagagtcctaagggccaatggctttgctcttcactttgcagcctaaactgtcccgctcatgggtgagggtgtgtgtgggagggaggcagttggcccaggctggcccacctccaaaaagaggcggaggaggaaggctggcagctggaggttaaagaggaactgcacgccccagctaattaagtcagcctgccaactgctaaacaatcagagctgggctcagaaaacatatttgacctctcctgccttcagttctgagcagttctcagcagtctgtttcctagtaggaaagttgtcagctaaggacgcatgcgggctgggggtgaggacccctgagtcgtaggtagtccaggctctgccagtgacttgtagtgtgtcttggtaattgacttgggtaaggcaatttcgttccttgggccctggttttcccatctataaaataagagtgttatggctgggcatggtagctcacgcctatagtcccagcactttaagaggccgaggcgggcggattgcctgaggtcgggagtttgagaccagcctgaccaacatggagaaaccccgtttctactaaaaatacaaaattagccaggcgtggtggtgggcacctgtaatcccagttacttgggaggctaaggcaggaaaatcccttgaacctggaaggtggaggatgtagtgagccgagatcgtgccattgcactccagcctgggcaacaaaaacgaaactctgtctcaaaaaaaaagaaaaaaattggtgttaaaaagatcacagttcccaaacttttatcaccagtagtccccttttcttattctactcattctaaccacaggccctatgctttgagagtttgtctaaattgaaattgtaagtcattttgcaggcttccatttttaagaaattttaaaaatcatgagataattgacgaaaattaatctgctctaccaatgcagtttttcagtcaatactgtggaaccatatctcttaaaggcagaatagggaagtagagagaacataggctttagaggcagatgaattctatacttaccggttgtgtaactttgggcaagttattcaaactctcttagcctcagtttgctgttgtatgaattaaaactaatacttgtcaaatgatagctattattattattatttgggtttgttttttgttttttttttttttgagatggagtctcgctctgtcgcccaggctggagtgcagtggggtgatcttggccactgcaacttccacctcccgggttcaagtgattctcctgcctcagcatcccaagtagctgggactacaggtgcctgccaccatgcctggctaatttttgtattttttagtagagacaaggtttcaccatgttggccaggctggccttgaactcctgacctctgatgatccacccgcctcggtctcccaaagtgctgggattagaggtgtgagccactgcacccggcctattattattattgaaagtaccacataatgatccacacagatttttaaaaacatttttcagatccatgatctcatttaattctcactaacacccctttaggtattattattactcctattttacaaatgaggaaactgaagctcagagaagaactaacttgccaaggtcatgtgctatgtcagcagaagaacctatctcactctcacaatgggggaagccagttctggctcaggtgccacataactcctacctaccagtgcctaattttggacacacaagtattttctgtccacgttactgacaggctggcaggcaaaaccctctgcagcatttgtctgtcagcagttccccagctgacccatcccctggcttcactctcttaaaatacaacctagccaatatacttgaaagaatatttgtctgatgacttctaaatgcttacagtctgaggtttctttgggcttagtgaggcttagcaaggacagagaggctcccttggaggtaagagcatgattaagagtggaggttttagagggaggtagactttgggatctgccaccaactcatcacttagccttaacaattcacttcgtttctcagaacctcagtttcctcatctgtaaaatgagggagttgaacagtattgacctcagagagcttattatgagaattcaatgagatcctgtatgtacagagcttagcacaaggtgtagcactagtaagtgtacattaaggactattaatgctatattaacattgcaataactgttagtatagcggcccctcgatgatctgaaaatcacttacctaacatcttcacttgagaaataggaagaaagcaaaaaatgcctctaagcagttaaaaaggataccataaaatttcgtagtcaaagcttatgcatttactcatccaagaggccctcacactcttcagacccaatcataacaatctggatcatttgttttcccaaaccacagcaaatcagaagggaggcatgggcatggggggtggaggattccaaattcaagcataccaacagcagtcaaaagtaagagctgagaattgggaaacagacaagaaaactatgaagaaaatgaatgagaggccgggtgcagtggctcatgcctgtaatcccagcactttgggaggccaaggtgggcggatcacgaggtcaggagttcgagaccagcatgaccaacatggtgaaaccccgtctctactaaaaatacaaaaattagccaggtgtggcagcatgcgcctgaaatcccagctactcaggaggctgaggcagaagaattgcttgaacccgggaggtggaggttgaagtaagccaagattgtaccactgcactccagcctgggtgagagagtgagactctgtctcaaaaaaaaaaaaaaaaggaaatgactaagaacttaaagcctagcagtcagagctattagcgcaggcaaacagccttgcgtgcctctctaaccctaggtagcactactgtattacagcaagctgcaattgttgacagtcataatgatgacctccactcaataagaaaaagttaaatcatagtcagcatctgttatttaagaaggaaaccttaaaataattttggcatgtaaaggtataagtttctattcctagaaaaatccccttattctctaatgatggctggcaagaaaagaagttgctaaacccatgaatgctgaaactaaagcaggatcctcctgctaccttttcacacccttacttgggtgagccgtagagctcccaggctttggcaattcccagggccagtcccttgctgggattattagagaggatcttgccagcttctttggtcttactcaggacactgagaacatgtctgttggaagagagatggctgttcagtaattggatggacctggaagacccctctgcccatgacctcatatatacagcaacatgactctgagaatcagctgagcactaaaaagcatcctcccatcacattcctgtaagatccacttcaggttggaatatgctgggctgccctaaccttggcccctggtgtatatgcctggaggagacctgagagcctctgtccccaccccaacctaccctagtgtcccagtgagctggagccccttactctgggcctccaggtgctgtctggaatcctgctgcagaccatctaaaatcattgcaacctggagcatcactgctggctagaaatggatgctaccaggcccagcccccagacagaagtccctgcattcctctctctggggctctcaagatattgttccctctgcctgtacaatggagggacaggactagatgagctatgaggtcctttttctccctgacataccaaggatctcattacaagtggaaactgctgtcggggtggccaggggcaacatgtgacccggggcccaggaaagcacaatcatagctggagttccctggcctagccagtgactgtacacccatcagcatgtcaccccacaggtatgccgggggctgcccaggggacccaccggtgcacagctggggtccgggaggccaggcccccaaagctggcagagatggtgttgatttcgatctgtttcagggctggggagccatctgcgctgcgctggaacatgtagtctgagcgattcaggcccaggaacacagtctgtggggaaaactgaaggctgacagtacctgcccagggactgactctgaggacctagccacagagcacacaggtaccatgaactctacacagagattagaggtaccagcaaacactcccaagcccagtggaatcattcttctggtcatcctagaattggtcactgggataaacccagtgaggaccagtgagaggcagattcccatgagctgagggcctggaccaaattcttcaagcaaaacagaaaacaaacagagatgggagggacaggttacagactggagtagggctgggaatggttacctgggcaatgccctcttttaggacttgcttgtggatgtcaaagagacgagcggtaaagtcatcctgtttgatggtgctggaggaagaaacagagaacattttgcaggcttaattggacctaaaatttcaaggagtcccatcctcagtcattgactcctgaatcctctctgagtctactggccaaaacttgaatgtccgccccaatgtggtagagaacagtggctaagaatccaactctagacctgggttcaaatcctagctctaccactcactagtaggcaacctcagggaatcatttcacctctctgtgtctcagtttgctgatctttaaaatggagaatataattatatttatatcatagagttgtggtaaaaagccaataagatattacattcaaagaattgaacatactgcaccgaagaagagctagaaaatgacatgatgtatctattctacttgaatagctctgatggttggcaagccttctggttgacctaatactaactctccatagcttttcctaccctctgcgacctcccagggtgagccttctcctcctcctccacagcagcccttggagattagaagacagcagttatgccctgtgcaccaataagatttttctgacccaagctaaatatcctgggttttttttgtttgtttgtttcttcttcaactagtcctcatatgatgtgatttcctcagggaagccttccctatctgagtcagatccccctactatgtgttctcatagaactaagaaccactcctttacagcactgactgcagttgcaattttacattttctttgtgtgatgattagtgtcatctctcctgtttgactataaacctcatgaaggtaatggctgtgtctatgcaggctcatcgtcacagctcagtgtactgccatgacatgtgacatgtgttaggggcctatccagtatggttttctgaagtctcaacaagagccacagtaagaaggaatccacaggtgattaacatcacacttactgccctttgagattcagggtggattctgcacacctgctcaagcctgaatcaccttgttacagaaacgtcacagcagaccagtggggggaagccaagtagcccaggcctgccctgaagttcctctgctcctcagccagctctctcccaagggtgagctctctcatgccagcccttggttaggaggagagtcccagctgggcttcagcctccaaggaagttgagacacactttcctttttctgaagaggtgctccccttcatgttttgtagggggctcttctcccttaggaactagggtttatatgtgtatgagaggagagaggaacagagaaggcaggggttgcaaagatgagctgcaagtctccttcataattgcatcattagggttataagccaggctgctcatgtttcccacaatccaggattgcaggtacaaagctgggcccattccaagaaacagctcaggggcaaggtggtgggcagattcatacattcatgactcattgggtttttggctacaagtcaatggtttccaagcttcttaccattatgaccccttctcatattcacccacacatttttaaaagattttgtctccaacaaaagtctaatttctgttgaaaaattaatcaaagacatgcaattacaggttggatatcccttatccgaaatgcttgggaccagaagtctttcggattttggaagatttgcatatacgtaatgagacatcttggggatgggactcaagtctaaacacaaaattcatttgtttcatatacaccttatactcatagcctgaagattattttatacaatattttaattaattttgtgcatgaaacaaacttttgactgtgttttgactgcacctgtcacatgacatcaggcgtggcgttttccactggtagagtcatgtggtgttcaacaagttttgaattttggagcatttcagcttttggatttttggattagggatgctcaacctgtacagtatatacacatctagcatgtatatgtaaatacataatatttctagatatttaattctacaatgaatatatatacatatatatatgtattattatttctttttttttgagatggagtctcgctctgtcgcccaggctggagtacagtgtcgtgatcttggcttactgcagcctctgcctcctgggttcaagcgattctcctgcctcagcctcccaagtagctgggattataggcacccgccaccacacccagctaatttttttatatttttagtagagacggggtttcaccatgttggccaggctggtctcaaactcctgaccttaagtgatccacccacctcggcctcccaaagtgctgggattacaggcctgagccaccgcgcccagcctatatatatttaattctaaaataaataaagaaattttaagaaattgccccagaatctgaagaaaaaaaaaaaaagatcaagggaaagagacagagaagggcggatgggctgaaccatttcagaggttgcttcctcatgccctgagtgtggcccagtctgtaccccatcccatccaaagatgagaggcctgaggtgacaagaaagtgtcgctgcttaggagaagtagaaaatctgactttaacccaataaccttccctacctctgttttcctccaaaaccaggctgacttcccctaattccaaatggaaatatcagtcttcaaagtagggtgtcacggattacagaatgtcaacaataaagggatcttggatttaagccagtctcttcatttttcagatgaagaaaccttaggcccagagaaggaaagggagtggcttgaggccatataaataactggtcgagccaggattagaagccagctttcctgactcctatgactttttgttctttggaggtacctttcctctatcccaccaagtcagctgacacagtaacacctcacggctctgcaatcttccagttccttggctctggcagctcctggccccccaatgcttcactgtcccctacctggaaagagtttgctccaggaaggcagcgttctggctgacagcatccactagcaggttgaagtccatctgcacagcataggcttgctccagcagggcactggggaccagtgaggggaagagcgtgaatggggcatagctcaccacctgtgatcaagaagagagaatgggacaggggtagggcacctgtgaacgggttgtcttcctgcaaatggaatcccatggaaagtctggcctatatttactgaggacacaccaactgtagattagtggttaccttgggagagtggaagggggagagtggaacccagagagcttccagattctgtgatagtttatctctacgtattgaagagagagaagcaaaaaagcaaaatgcaaataacaaaaagaaacccacaagttattgagcacttactatgtgcaaggtactattttaaatactttacatagattcatcattcagccctgtgaggaagatactattattatccacacttaacagagacgggacctgagaaagagaggttaacagatccaaaattatattcagctaggaactggtgctgggatttgaaccagaacagttaacagatccaaaattatattcagctagtaacggggtgctgggatttgaaccaggatggttactaaacacaacacacacatacatacatggaagcctgctccttgctggttgatgttcaagcccaggcccttccatgcatcaggagctcacactccagtttccttgccttttgattttgatttggttactgggtaggacaagtgaactctggttcccttagtagaagccaggagtgttttttccaccaatgttagtgatggtgactcaggttaacaggcctagagttcagctgcattccgcattctttggactttatcatagacgagaaacccaaataccatcaaggacactgattctagaagggaaaagtgcattctgagatccctgccaacaactgaactagaacttgggtaagagatgaaaagaaaatcttgtgacttgtattataaagcattcctgagtttaacctttgagttaatatcagtttgtcattatggtggtataagtttacggtgttagaacttggtatttagatatttatttttaaagtactatttttttttttgaggtagagtctcactctgttgcccaggctggagtgcagtggtacaatctcggctcactgcaacctccatctcctgggttcaagcaattctcctgcctcagcctcccaagtagctgagactacaggtgtgtgccaccacacccaggtaatttttgtatttttagtagagatggggtttcactgtgttgtccaggctggtctcaaacacctggcctcaagtgatctgcctgcctcagcctcccaaagtgttgggattacaggcatgagccaccatgcccagccaaaatattattatttttttaacaggtaatacaaatacatgatacaaaattcaaaagagacataagaatatatagtgagaagtatgtctcactctcattccagtctcctggggaaaagactgggccccagccacccagttctcctccccagaggcaaatgacagactagtgtctcacacatccttccagtcatctttgtattgatatatatgtatacacatatattttctctttttttcacccccatagcaaactatactacattgtgctttttaaatatttccttatatgttcaaatagagcattttcattatttttaattgctgtatattattctactcttaggatataccataatttattgaatctagtatataggtggtttctttattttcctattaccattaatgtttcaatgggtatcctagaatatacattctagatattttcatatatgagaaagtccatacattctaaatttctaaaagtaaaaatatcaagtaattcaggtaaatctattttaaattttggtagataatttctaaattacccttctcagcatcttttttttttttttttggagtggggtcttactatgttgcccagactggaatacagtggctattcataggtgccatcatagtgcactatagcctcaaattcctgggctcaagcaatcctcctgtctcagcctccccagtagctgagactgcaggtgtgtaccactgccctggcctcagcatctaagataaaactgaggaaggctatttgtgagaataaggtttattcagtctgaagcctttatgagttagaatgggaatgactgcagattacataaggggtgacctaataccctgagtagctatgtgatgactacaggagcatttccttggcttgaacacatagagctctgctgcccccaacaagtctcatcttggcctcaaaaactcagagtttttctgctaagacatccctctgcctctgtcccagggctcattatgccctcctgaatttaggatcaatagtttatagctgttctctgctatctacaggctaaaggctgaaacacacagtcttctcacttttgatagagacattaacataaaatgacattactggccgggcacggtggctcatgcctgtaatcccagcactttgggaggccgaggcgggcagatcacaagatcaagagatcgagaccatcctggccaacatggtgaaaccccatctctactaaaaatacaaaaattagctgggcgtggtggcacacacccgtagtcccagctgctctggaggctgaggcaggagaatcgcttgaacccaggaggcagaggttgcagtgagctgagatcgtgccactgcactccagcctggcgacagagtgagactctgtctcaaaaaaaaaaaaagaaacatttttctactatttaaaaaaacctatagcacgtgcatgacaaaattctgctttgtagccaggaagcaacagggagtgataggaattgtggcaaaaagaagtacttgcatcttctctaaagggggcagccagaactctgctctagccaattgttgccatgcaggaaagtaggccagagttgccagatgatataatttttcaagacaagttgggttgctagattttttgttttaatttcatgatttttttttttaaatgttggctctgactttttaaaaatactctggtgaaaacaactgttaacaatgcttgcccctggtcagggaaacagtggctggaggaaggggacttactctgtactgaatacccttttgaattttgcgccctgttcaaatgtatttgaacgtattacttattgtaaaaaacaaattaactccccaaacactgcaggagccaaatactcagcctagatatggctagtttgcagctctgatctacaggataaagttcatactcctcctccacccagtagctaaggccccgcggctgtctgacgctggcctgccttctttcccactatatccacttatgcgccctgcatttcagctgcattctcttgaacatttttttttttttttgccttttcctacttttgggtccttgctatgctgttccttttccctatttgtcttttaaggtctagttcaaataccaccccccatctcaatcatctaatcataatgaactactctttcttccagctgtcctatatagtatcttgggagaggaaaaaaagcatggatgttcagagcatggactcaggagccaaattccttgggttcacatcctggctctgccaattattttaccatttaaataacctcaggtaggttacttagcctctctgggcttcggtttccttatctctgttgtggtgaggagtcagtgattccaaagtgtttagaataatgcctggcacatactaaatactcaataaatgatagttaactttgtgtagcagactgcctgtgtttcctcatagagctgatgttatttaattttgttttgtggtatgttctctaactagaccaggagccccagaggctagggctctggctgactcacctctctgtcctcagtgcctacaatggcccggcatagagcaggcatttggtaaagatttggagtaaaatcattctctctctctctctctcacacacacacacacacacacatacacacacacgtacactttctgactttttttctggattagaaatctcattgtggattacgccttttctaggctccataacctcccagaaagaccaagtgttggatcttcacatggtacctattgattaacagaagaaacaaaagcgtggaagagaaaatgcttcattttagattcatacaagtaattcacaaaatctaggttcacagcccaagcaattctattccataccatcagcctgccttaggtgacagacattgtcatttacttgggccttagcaaacaattactgagtgtggactccatcaggcctgtgtaggttctgggcacacagagacaaaaaagaatgggtctggctaaaaaaagaagagatgttggcagctctttagtcaccaatatggtcttaaggtgtactgttaagttaaagaaaaaaaagtgggcaaaaggaggctgggcacggtggttcacacctgtaatcccagcaattttggggggcagaggccagtggatcacttgaagtcaggagtttgagaccagcctggacaacatggtgaaaccctgtccctaccaaaaaaaaaaaaaaaattagccaggcgtagtggcacatgcctgtagtcccagctacttgggaggctgaggtgggagaattgcttgaacccaggaggcggaggttgcagtgagccaagattgtgccactacactccagcctgggcaacagagcgaggccccaaggaatatatttacttgttattagttacttgttatgaataagccatctgaaaggatcaacaagaaaccaaaacacaagctgcattagggtaaactcttgtaccatttgaatttgaaccatgaaaatgtcttacctagtcaccaaattaaaaaagattttatttttttatttttttttcttccctaaggatgaggttttaaaaaggtgtggtttggactcagcagttctacttttacgtattgaacctggagaaacactcacataggtgccccaacagacatatgcatggatgttccctataatgctatttatggtcataaaataatgagaaatcacctaaatagacatgagtagagggaagctaaactgtgatacacccacatctggaatactatgcctcagaatgaagatgaccctaatagaaggcattagaaagttctaagacagacaaataaaaaaccaaaaacatatcatagaataatatatatgatacaatttgttttttaaaaaagacgtatttctatatatacctatctatgtatataaatgcacagagaaaggcttgaaagcatatatcacaaaccagttacagagaaggtagagtgattatggggttttcagtaatagctcactgggcaaagtgcttcacatgaatcatcctgtaattctcttaccaaaccagtgaggtaggtcctattattatcccatttttacacctgaagaaactgcagctgagagcggttaagtaatttgcctaagtcacacttcaaaccccatatttaaatttgattactccaggacactgcctttttattttctacttctagagatcaattttagttactggaaaaaataaggcaaaagagatatggtccctgatgcaaaggagtgaccctcagcctggccggggccagacagtgggccatggtgaatgctgtggggaggagctaggggcttacctccgaggaagtgggctcctgtgaggtcctcagcaatactccctcagccagggcccggtccacggcctgccgtgccagctcctctagctgctgtttatcctgcaagaggctcccccagttggtggccatcccaacacctgcaaaagatggagagaagagagttggtaacagatggcctgaagcccagcaaccaccgaaactggctggcggccacccccaacacagcaggaccctgacctctgttggaagggaacagcgtggtatacaggagtgaacactggctggttctagctcttaacaacttccatgtgcacaaaatagaaagcttgacaaagcatttccattgccactctctcttttgattcccaacacaatggcattattctcacagtaaggaagcagaggcttggagaggtgaaatgacttgcccgaggtgatgactggtatagcctggacttgaacccatgtctctggactcccagcctaaaggctcttcattggagaaagaagcactaatatcagatgtgactggggcaagttccttcccttcccagagctacagattccctaactgtgaaacaagaagaatcggatagatcagtttccaaacctggctgaacattctggggagctgggaaagaatacagattcctgggccccatcccagagactctgatgcaagaggcctgatgggaaggaggggttgaggctttgtatttttttttttttgatatggagtctcactcagtcgcctaggctggagttcagtggctcgatcttggctcactgcaacctccgcctcctgggttcaagtaattctcccgcctcagcctccctgagtagctgggattacaggcacacaccaccacgcctggctaattttttgtattttagtagagacggggtttcaccgtgttagccaggatgatcttgatcttctgaccttgtgatccacacgcctcgacctcccaaagtactgggattacaggcgtgagccatcacacccagccgaggctttgtatttttaacaagttttcctgggataggagtcactgcagtacattattaattcccttcaagctccaacaactcatgtcagcagatctcaaataaattacatgggaagggggagggagctctttgtggaataccatgaaatgcgaataaggtgaactcctcccttatacaaaccagaaggaatcttagtagcaggaaatgactacattccatatatggacatttatcatcaaagcaccaaaagacagaaaatatttttgagaaatcacattagcaagatggaaattgctgaaacccaagtgtccaatgtaataggagaagttgtctgattggttgcccagagacatacagaggtgtacaaactcacaccctgatactcattcatttttcagcaggcctcaggagtttaagatctgggtaaaaatctggaaacacagtcactaattttgttctgccctgttgccatttaacagaacatggttgcccaactcagtggtccccaggaagggagttagagaataataggaaacctccatcacattcagctctgtccccctgtccccatgacagagccagtgccaggccaattatgaaagtctgccagcctcagcacaatgctttgaaagaatgcgcatgtgatctcaagagggtcctgataatatccctgttgagtgagacatacatgagggcaatcatagtaaagaacaaggttcaagtcagacagacagacagacctgggtttgagtccataataatacgacttctccctttcccttctttccttccttccttttccctttccctttcccttccctccttctttccttccttccttccttctttttctttctttctctctctctccctccctctttctttctttttttttttttttgacggagtctggctctgtcgcccaggctggagtgcagccgcacgatctcggctcactgcaagctccgcctcctgggttcatgccattctcctgcctcagcctcccgagtagctgggactacaggcacctgccaccatgcccggctaattttttgtatttttagtagagacggggtttcaccgtgttagccaggatggtctcgatctcgtgatcccccactctcggcctcccaaagtgctgggattacaggcgtgagccaccccgcccagccgacttccctttcaagtaagattgctgtgtggattaaaagagaaaaatcagtgtgaaatttatcagcagtgtttgaagctctatacatgagaccattttttggctgtactctctttataggtaggaggagacttgtcagaggtcacacagaagcctagtggcagagccaggacaagaacccattaccttgacattagagtaatgaaaccctccatgagcccccatcgttccacaactctgaaattccaacatctgtttgctgttgggcttttatttagttggcaaacactgatttgcatttaatgccactcccttgactaggtactggggatatggaggaggataagacataaagataatcaccatgggccaggtgtggtggctcactcgtgtaatcccagcactttgtgaggccgaggcaggcggatcacccgaggtcgggagttcgagaccagcctcaccaacatggagaaaccccatctctactaaaaatacaaaattagccgggcctggtggcgcatgcctgtaatccgagctacttgggaggctgaggcaggagaatagcttgaacccaggaggtggaggttgtagtgagccgagatcgtgccattgcactccagcctgggcaacaagagcaaagctctgtcaaaaaaaaaaaaaaagaaaaaaagaaagaaagaaaagaaatcagatgaaggtgctaagtgggccctttgtttttctcattctacagcctcaaccctcccttggctttatttatgttttgctgatgacattcaaatctacatcttcacagcaatactttcctaccttcaaactagaatatccaattttttcctgcgagtctccatacaaccagaatagaatttgttgttgtctcccacaaatctgcttcttctctgatgaaccccacccaggtacccaagccttgagtacttgtttcctacatctcactctccccaaatcctatggattttgctgcctaagtatatagtactttgaattcctttatttatctccatttccagagtttgtagcctagccccggccactgtcatctcttccctgggcgtgaaacagattcagagtcaggtgtcttcagtgaccaggatatgttggcctctgtcccccttccaggacttggcacgtgctgtcttctctttggaactctcgccaccactcctgatctgggctcgcgatttcgttccggaagctgtccctgttctccgccccgggcttctacattctacagcccatcacttttccctgtaccgtaggaacagtgtttgtcttgatcacttctctacctagtaattagccgcgcttagtactgtattcattcatcacatgaatgaatgaagaatgaatgacagacgggtcagatcaccgaaagcctcaaaacgcccacaaggaaatcggtcgcactttatcgccaggacttaggccagtgcctggaaaggccccgaggcaacgacacggtcggctgcccaggctggccccacttcacgggcccgctcgcttccaccctggacaaagtttggccctaatcgctccccgttgtagctctaactggctccagtctcactggcctacatgccccgacaccggcccgatctaaaggcagaagatccggaaagtctgggatcagtgcgcgccagcccaaccccctcactagacactagttgccccgctcctacgaagggtttcagccacaaggtctcccggcctccggaattccaatctcttgccagacccctccctcacatcgttcctcccgaggaaacgtgacccatgccggccgccgtggccgccccaacctactagttcgcctttcctccgcgaacggttctcccggccctcgcgccgctacccaggctcagggggcggggcctcgatgcgacccagtgcgcttgcgctgaccgccccggctaggcttaaagagcaggcggggcagagacccatacctttggcgctgagtcgaggccaggaaggggcggtcgatgagagggcggccttagcattaggagtgcgtcggctgcaccctggcggatggaccttgggaaggaggggaggggaccatcggggtcggcggggagctacgggtatgcatagctcatagagcgtcagagctgacgacgactagtggaagatggggaaactaatgctcagagcgggacagtcactacctcaggggcacacaattgataagggtgggggtggccgtggtaatggaggccccaaggaggggcaggggcccatagtacgtcaggggctgagcctgtattagaacccaggcttgtttcccagcccagccaagtcccagaaaaatccccctgattttatctatttttttttaacctgggataccagcagggaaagcattagaggcaaaaggaaaggattttcatttttccaggaatgctgaagtcaggactgtttgaggggagccctgtgtttctcagactctcttgtaccgtttacatcaggatctggggcagtttttaaaaatatgcggattcatgattcctaccccccacctcattgcttggcagcccccaggtgccttccctgtttcttccttctgggttgtgataggcttgtctgcagtccgaagcacctgatacgaattttagttaaatggaatgtatcagtccagcttctagggaattaaccataaataagacacagccactgctttcagtctgataagataggcaataaactgcctttctgaaggaatcagggatggtttttggggtcttgaaggatggataggaaggtataggtagtgaaggaggtaggggtagaggtgagaggctgggatggggacagtgttccaaattgcaggaacaaaagcagcaaaggctggctgggtgcagtggctcagacctgtaatcccagcactttgagaggccgaggcaggtggattacttgagctcaggagttggagaccaggctgggcaacatggcgaaaccccgtctctactagaaatacaagaattagccgggtgtgttggcccgtgcctgtaatcccagctactcgggaggctgcggcgtgagaattcttgagccccggagacggaggctgctgtgagctgagatcacgctgcagcactcctgcctgggtgacagcgtgagaccctgtcctaaaaacaaaacaaacgagcagcgaaggcatataattctgagggttgctcggcttgttttacagacactgaggagtttggtgtggataatgaggaagggcctgagggttgcaacaggacttaggcgcttaggcttggagaggtagcctcagacgccagttccactgagcaacaggagctaagggctttaagcaggggaaggacatggttagttttgtgtgttaggcactggttacagcgtgacaaatggtttggaagtggggagatgggccagagaaagcagagagagttaagatgtgagatcatgaggctgtagccagtgcagcagctgtggagatggagcgaagcgaacagatcaaagaaatttaggagtgagaactcctagtgatcgtaaatcagtggcccaacccagggaccaagatccttttgactctttttttttttttttttttttgagacggagttttcgttgttgttgcccaggctggagtgcagtggcacgatctcagctcactgcaacctccacttcccaggttcaagcaattctcctgcctcagcctcccaagtagctgggattacaggcgtccaccaccacacccggctaatttttgtatttttggtagagacagggtttcaccatgttggccagattggtctgaaactcttgagctcaggtgatccacccgccccagcctcccagagtgctaggattacaggcgttagccactgcgcccggccccttttgactctttaaataaaccatgtacattatctgactacaggacaggctgagtcctccagtctcccgtgtgtggtcacgggatggggggagatggtggcagataggtgtctggttattcccagaacaatgtttcctgatgtcctttcctcgttggcttttgtacctgaggggataagcagctgttaactagaataggccccaggtggcaggaagaggctcctgggtcaaccaggaacaaaagaagctatttctagtgcagcatgaaattaaaaatcaaaagcatgacccagggttctctgtgcaggttcccctcttccaagacgggtgccaagtgatgagtatcaggtgtctatggtgagatttggggaggatcccagaccttaacagccctttggttgaaacctctcacaatgtggcaggtaagatgtctttattcccattttgtagatgtggcagctgagcctcagaagttacgtgacttgttcaaggtgacccagtttgtggtaggactgggagtgaaggactcttgactaagaatctttccagggagcgtttgccctttctgcactctctgcctgggtgctttcctccaaaatcctggcatgactggctcctttggtcattcagatgtttcatccctggaggctgccccaccctataagtctatcacgttatccttttcttttttttgagatggagtctcactctgttgcccaggctggagtgcagtggtgcgatcttggctcactgcaacctctgtctcctgggttcaaacaattctcctgcctcagtctcctgagtagctgggattacaggcacgtgccaccatgcccggctaatttttgtatttttaggagagacagggtttcaccatgttgatcaggctggtctcaaactcctgaccttgtgatccgtccgcctctgcctctcaaagtgctgggattacaggcgtgagccaccgtgcccggccttgtattttcttcatagcagttattcatatctgaaattgttgcttttatttgtttgctgtttccctctgctagaatgtgagccccatgaaaatgggccatgtctgtcttgttcaccactttacccccaggacctgactggtgcctgccacgtggcagatgctcaataatatttgctaactgatggaaatagtttggggagagagaaagagaaggaaaccaacatttaatgaaagctgaggatgtttcaagtacttctcacaaattacctcatttaatcccttcacagcctttcaaggtagaaatcgtatctccattgggtgaataagaaaccatgctaagtcaggtcaagtctgtggtttgttacttttgaggctatagactcgtctgagatccattagtataaaattttgcatcagctacgtggaggaattcacagaccttctcaggctcacttggggatctcagatcaagacacataggattggggaacttgcccagggtctttttggccccaggcctttgctggatcctcactccctggcaaggatggagtccatgtagtggactgtagggaacctgctgaagattccggagcagagggagatgatttgccctgagcctctggtgtctcagacctgagtttgaatcctgactgtgcagaagtcatctcacctctccgaatcccactttcctcattttattttttttctttctttcttttttttttttttgagatggagtctctctctgtcacccaggctggagtgcagtggcacgatcttggctcactgcaacctctgcctcccgggttcaggcaattctcctgcctcagtctcccgagtagctgggattacaggcacatgccaccatgcccagctaattttttgtatttttagtggagacagggtttcaccttgctgtccaggctggtctcgaactcctgacctcgtgatctgcctgcctcagcctcccaaagtgctgggattacaggtgtgagccaccgcgcctggctttcctcactttcaaagtgaaatctgttttttcctaacaataactaccctttattgatctggtcgctaagtgtcaggtacttggctaatgactttacagtcgttatctcactttcccttacctccctatcacatcagtatctttatagcctccattttacagccggggaaaggaaggcttgaagaggtatcctgacttgccaaagatcacagcagcagtgtcagccatggtgttcccacatatgtaccttgggacatgccatgggctcagacttcccaaagctaactgttgaatcaatttcatcctctgttcttggggtttgtgggaacatttgggtctgaattaggtgaaaaaaggtatgcagggatgtacttcactgtgaatggaggccaatcccttaattttgtgtcttgcctttctccctgcgagggcctctctccaagtctggactgtgggttttttttgtttttgtttttttgagatggagtcttgctttgtagcccaggctagagtgcagtggcgccatcttggctcactgcaagctccgcctcccgtgttcatgccattctcctacctcagcctcccgagtagctgggactacaggcgcctgccaccacgcccgcctaattttttctatttttagtagagatggggtttcaccgtgttagccaggatggtctcgatctcctgaccttgtgatccacccgcctcagcctcccaaagtgctgggattacaggcgggagccaccgcacccagccactggactgtgccttttgattggaacatctctgtcagccccagggtctgcatcacacatggtctgcatctgtgcacatggctactgtctctttttagcagtgatatcaccctgcctcatactgttgtttatgaggccatctccccacctggctgggggccactgctttggccattcagagtggaattcctctgtcttccagcccctagcacaggcctgggccagcattgctgctcaggaaatgcctgtggaatcaaagtgaggactgtcccaggtgttgaggatttactgtatgctaggcctgtccctgacactttatatgtgttatctcatttacacccccacagtcatcctgggagggagaagttactctgcctattttaccgagaagaaacagactaattgaagttgggctttgccttaggccctcttgtggtggttgatggcacgagggccaactctagggtctgtgccctggtcgtgtttgaggtgtgtgggctgaaaaagggaagacacacttcaaggctccagggatcctcagagaccttctactaacaggttcccagtccggctctcatttcatccgtgaggacacagaaggttagaaaggggagataacttacttatagaccctcttctccacttgttatatacttatgtatccacttactttttggcaggatggatctgttttgactcaacattgtaccacccatgtagcccagtgcctaatccaggttgatgcccagtaaatacttttacattttatttattatgaaaccactgagaaaggtataaaaattaacagaacaaatacctgtgtacctaccatccagcttgcaaaataaaacactgctaatataaagacctttttgtttccctccatgactgaccccccaacccaagaagtaaagactctcctgatttggtgtttattattcctatgcaatgtttattgagatataattcatgcaccataaaactccccctttaaagtgtgcaattcagtggttcttggtatatttacaagattgtacaaccattaccactgtctcattccagaatattttcatcaccacagaaagaaacctcatccctattagtagatactccacaattctccttctccccagcccctggcaaccagtaatttactttctttgtctatggatttgccttttctgaatatttcctgtaggtggaatcctacaatctgtggccttttgtaactagcatctttcacttagcataatgtttgcaaggttcatccatgttgtagcatggatcagaactttattccttcatatggctgaatagtctttcattgtacagatatatcacactctgttcctccactcatcagttgataggcatctgggttgtttccactttttgccattaagaataatgctgctatggccaggagtggtggctcatgcctgtaatcccaacactttgcgaggttgaggtgggaggatcacttgagctgaggaattcaaggccagcctgggcaacataaggctctctacaaaaaaatttaaaaattagccgggcgtggtggcatgcgcctgtcatccccactactagggaggctgaagtgggaggatcacttgagcccagtaggtcaaggctgcagggacctatggtcacgccactgcactccagcatgggtgacagagcgagaccctgtctcaaaaataattataataatgctgctatgaacattcatgtacaggtttttgtgtgaatgttttctgttctcgtgggtagatacctaggagtggaattgccgggtaatatggtaagtatatgtttaactttttgaggaactgctgttttccaaagtggcagcaattgtatcagagctccaatttttacatcctcaccaatacagttatccctctgtatctgtggggaattggttccaggacctcccatggataccaacatccaaggatacttaagtcccttatataaaatgatgcagtgtttcatatatgcttaagtcccttatataaaatggtgtagtgtttcatataaactatatgcatcctctcatatgctctttaattttgttttattttattttaaatttaaatttatttttatttattttgagacaaggtctcactctgtcaggctggagagcagtggtgcgatcatagctcactgcagccttgaactcctcggttcaagggatcctcctgtctcagcttcccaagtagctgagactacaagcgagagccaccacactgtcctttccatgtactttaagtcatctcggccgggtgcagtggctcacgcctgtcatcccagaacctcaggagaccaaggctggcagatcacctgaggtcaggagttcgagaccagcctggccaacatggcgaaaacccatctctactaaaaatacaaaaattagctgggcgtggtggcgcacacctgtagtcccagctattcagggaggctgaggcagagaatcgcttgaaccccagaggcagaggttacagtgagctgagatcgcgacactgcactccagcctgggtgacagagcgagactccgtctcaaaaaaagaagtcataaatgctatataaattgttatactgtattgtttagggaataatgacaaggaaaaaagtctgtacatgctcagtacagttgaaacattgttttcaaatattttcaagctgcagttggttgaatacacagatgtggaacccatggatatggaggtcccactgtacttgtctgattgtggccatcctggttggtcattgtggttttgatttgcattttcctaatgacaaataatgcgcatatcttttcatgtgcttattggtagtttgtatatcttctttggagaagggtctatttaaatgttttccttatttgtaagttatttgtccttttattattgggttgtaggaattctttatatattcaggatagtagatccttccttatatgtgatttgccaataatttgtcccattctgtggatggtcttttctgtttttcgatagtatcttttgaagcacatattttaaaattttgacgaagtccaatttatttattttttcctttgcttgtgctttgaatgtcatatctacgaaaccattgcctaattcgaaggtcacaaagatttacacttactttttctaagagttttatagttttggctcttaaatttaagtctttgattcattttgagttaatttttatataggatgtgaggtaggtcttatgcatttttaccctcctattaggtgtatttctaagcaatatatgacactttttcatggtatttgcacttttaagtggtaaattatatgattcttgtgcagcttgcttttctctttcagtgttatatcaggagatttatccatgttttaaggggaaatagttcattcattttcactgctctataggtttcattgcataaaaataccaaagtggcagcaattgtatgagagttttgtttattctcctgtgaatggtcacttgggttctctagtattttattactatatatggtaaaaagactaatagatgcctcctgtgcagtgtgttgaaggtcgtgagcatattcagacttacaaggtaatacaaagtttctttcccaaatggttttgcaaatgtgcactcctgccagcagtgtattagaattgccctcattctgcatcctcaccgagacagaatggtcaaggtttctagcttttgtcagtctagtgatgtgaaacggtgtctcgttgtgattttccagattaatagcaagatttgtttttcagtaagtgtttacatggttggatggatgaatgcatgaaagcagaaggggcccagaataaccctttactctgcctgttgttggaggatggcagggctctgggcctagactatgtggctctctgtagggacaccgtggagctagagaatgttgggggcaggctgacaactctagatgtgggagaggacggttgtcaccttgaaactagtgatgggagcttctctctacccagggagaggctatcgtcctgctcttccatctccttgaattttccaagaagggagggagtggagaaagagtgaagccaaaagagaattcctgggactgggcgcggtggctcacgcctgtaatcccagtactttgggaggccaagacaggaggatcacttgagaccaggagatagagaccagcctgggcaacatagtgagatcccacctctacaaaaaatttttgtaaaattaaaaaacaagggaattgcctaaggatgagaggtcacagtggcctaagtgacccttaggaatgaccctttttctgggactttttcatgatctttatattggtgtgacatgaactttccttgtttaatctactgagtttggagatggtcttaatgataataagaaaatgaatagtaatgattatatgttgaactcttatgtgccaggcacttacgccttttctttttaaaaataggtattatctcattcaattcctatgggacaggtactattagtattcccattttattttatttttaaaatagggatgagtctcactgtgttgtctaggctagtctcaaactcctggcctcaagtgaccctcttgccttggcctcccaaagtactgggattacaggcatgagccaccgcacctggctcattcctgttttatagatgaggaatcagaagatcaaagagacagagcaactctgagggtttgcacataggcagttggactccagaactcttaggcatcatgctgtgtggttaacctggctcagccgaatccactagagcaaagaaaagagaggcttgcccaggcttgggtgagaaacaggagtcagaatattcactgggcctggcctgagggcgcagcagggagcagagcgagaggccgctgggaaagatggttctcaaaagcagaagcctcacgccaggggacatggcccatcagcaagcacatgggtgcctcttctgggcatgctggctgctggggacccagaatgggatctgtctgctcctgggtctcaagaaagacctgtcttgtggggtagacagatgataataagcagacttacccataagtgtaatacactcagaaatggggacatgtgatacagagggtgaagagagaacctttatagaaaggacctagtttagttaatgtagtcaaaggaagcccctttgaggaggtgacatttgagtggaggctcgagaagaaggaagcagccatgccccagtttggggaaagagtaaatggcagatgcagagtccctgagacagaaaggagctggtttagttgtaaactctcagaaggccactgtatctggagtgatatgaatgagagggtggggctactgtagatgggctggtcagttggcagggccaggtcaggctgggtctccaggccagggtcaacatataggtctatagccaacatgtttaaataaggcccataagactgtcttcttgctgtccctgagaactgggtgtttgcatatttggaagggactgaatcctgatgcctaggctgggaaagagggtcggggggtggggagaattcttggcttctggccctagaaagctggaacaagaatttggaggctgcatcccactgactcccagatgggttggagggtgggtggcctcagccaccagggccctgtgataaggtggcaccacatactgatagctgtccagatatccttccacaggtgaacggttcatcaaactgtggcgcatccatacataccatgagtaccactcagcaataaagacacaaacatgaaatgagcaacaccttggaagaatctccagggacttatgtggagtgaaaaaagccagtctcaaaagagtacatcctatatgatttcatttatgtaacattttggaatgacagttttagaaacagaggacagactggtggttgccaggggttaaagatgggagggaagttagtgtggttctataagggcaacacctttttattgttagaactgttcagtgtcttggtggcagtggaagatctgtgaattgacacgggtgatgaagtcgtatagaacttaatacatgcagatgtgcgtgcacacacacgctcacaactagtacatgtaaaactgggaaaatctgaataagatcggtacattatatcaatgtcaatagtacagagttactgtactattgcttacaattgcatgcgaatatacaattatctcaatagaaattttaattaagaaatgaaatttggctaggcatggtgaggcacgcctatagtcccagctacttgggaggctgaggcagggggattgcttgagccaggagttcaaggctgcagtgagctatgattatgccactgtactcgaacatgggtaacagtgataccttgtctttaaaaattttttttttaaaaaagggaggctgagcacggtggctcacacctgtaatcccagcactttaggaggccgaggcgggtggatcacgaggtcaggagttcgagaccagcctagccaacatagtgaaaccccgtctctactaaaaatatgaaaattagctgggcatggtggcgcgcacctgtagtcccagctactggggaggctgaggcaggagaatcgcttgaacccaggaggcggaggttgtagtgagccgacatcacgccactgtactccaggctgggaaacagaacgagactccatctaaaaaaaaaaataggaaatttaaggcccaaagcattagatagaatgatagagatatttgtactaataaaattttcagcccatggaaaaaaaatctgaaggctctgctcaaggaggtctcttgtccttgagttagcaaagtcacagggaggtaggcagtgtgcccccagctgtgggagcaagcagggtcaccctcaggacactcaatatagagcggtggtaccctcagaccctctgggtaggtttcccagcttagccttttgggcctccctctgcccctcacccctcaagctgattgaccacgatcacaagggtagagcagagctacagcaccccccgccctccactgctgcttggtctttcatggagaacagacattctcctgctccccactccaccaggttaggtaaggacccttcctggggaggcccctgtgtcaactgtgcttaaccgtctgtgcctgtgtgtcccccagcagcctaagactcctgaaccttcagaacaaacctgatgccaattccaacctggagggcacgggagagtgtttgtttgaagcactgaactacatgggaaactgaccaagcctggggcaagcccatcctgagaccccaggcagggcctcagctttggtccaggatttgtggggtggttttacaagatcctgggatttcacatgtgggccccactaagacctctcttccagaatgttggctgcattgggcactgtctcaaattccacctacagagtggcagacccaaggcttcccgccatagtaccccaacacccacagagccacagctgcatcctcaaattaattgacatcttcccatgggctgagcactttgtttcatttatttctctcaaccacattacaaggtaggtcttctttgtgtatttattttgcagagaaggaacccagggctcagagaagttacgtaacttgcccagggtcactcagcttgtaaatggcagagcaaggatttgaaaaggcagtcctgacatgtggcaggcctgaacgagtccctgcagatgcaaagctgaaggagaaacattgcctgctcttaaggagctaatgataatatcaccagatatttacatagtgcttatgatgggtcaggcacaggctaggctctctgcatgtgttatttcattgaatccacaccacaacccagtggaataaggttatgcctgttttatgatggaaattgaagctccgtgaggaagagggacctattcaaggtcacatagtgagttggaaagtctgacctcctcttgttggcttcttccatcctccaggctggcctcccaggcccctccctgctcgtggtctgtacaccccttctcccttacactcggctaagccttgtccatggcccctgcccctttcatgtctattcttagcatagtttggagcctgcggttgggccacattatctggatggtgacccctgggggtacatcttctaccccagtgtgtcctttagcccttcctgtctcttccagctgtgcagcaaggggcgtgttagaggggcccactacccaggcccttacactgcggcagcctacctaagtatgcacagcgcacgtagcgtagaggatggagcccgcaggacacccttaatgcccttacctggcagggaggccagcacacaaggggctgggggcgggactgggcttcttggggttgagtggttctggaagccgatatgagcagcagcaactgctggcattatctaggctctaagaatagcttgggatgaagagtcagaggttgaggccagggaagaggacaggagcctgttcctactgccccctcctgctgcttggcctggaagctgggaagcctgcctcctggctcaccatttgctctgggatggttttgcatagacacatcttgtccaccactggactggaggaaagagggtacccctgggactcagacctaggctgcttgacctcaggctgaaggcagtgggcccactctctgaggaccagccctcacccaggcccctcaccactggcacagagtaggggtttgtatttttcaaggatcatgctggaagtgacccttattcatttagcaaacactttaaaaataggttatacatacacgatttaaagttcaaagggtttacaagggaaaaaaaatcactctgcctcccttccctggcccccagctaccaaacactgttaccagctttcttgggtgacttccaaaggcagtccatccatagataagcacacagatgcacaaatgtctctctcccccgatttttacgcaggagatggcatagcccatacattcttctgctccttttttttttttttttttttttgagatggagtctagctctgtcgcccaggctggagtgcagtggcacgatcccggctcactgcaacctccgtctcctgggctcaagcagtcctcctgcctcagcctcccgagtagctggattacaggcacctgccaccatgcccagctagttttttgtatttttagtagagacagggtttcaccacgttggccagactggtcttaaactcctgacctcaggggatctgcctgcctcggcctcccaaagtgctgggattacaggtgtgagccaccgtacccggccacaacttttttttttttgtaacctaatgatctatcttggaaataacagcaatgacatattgagtctccactagtgtcaggtactattctaagcattttagatggtttaactcatataatgctcatcacagcactaggaggtaggtcctgtttgtgaatctccaccattaagaggtttagtcattctccaagacttcgtgcctggtaactggcagagccaggactaaaacccaggcagcctcactttagatgaggtgctccttcctcactgctctgtgctgcctcccaagcttgagacatgttgagactcacatcatgccctccctcttcctaagggccaaggtaagccatgtacggtgaacacttaccacgtaccaggctgaggctgggctactgcagtgtaagggagaccaggcctctgtcctcatggaactgtcatcccagtgcccatgagtgtctgccagccaaggcaggaggagggaaacccacttgtctcatacccatgtgcccttgtataggtctgctgttcagacacaccctggtcccatgtccactagtcctgtagtcacaccgcctctgagctggaaggccttagagcccagagttacagatgggaacataggggcccaaacagaggtggacacgagagatcatcaggtggccctggtgagactcatcccctgcctcccgggatctatttcagcagggtgggtggggggtgactttaatccagggcccaaccattgtttgaagttggaaacaattgaaggacaagggagctatagatagatccacagctgctgtcacttgtcccagcctgggcactgggcctgagcattgtctacagaggggcactctaagcagtgaggcccactcctgggggtaggaggttggcccagcccagctcagctcagctcggctctagagataaagagtcagaggccaagacagaaatacagagtcttggaaggcagagagtgggacaggacaacatcgaaagaacaagacccttgagagatacgatggactcccatcaaatatcgacaatactcagactggctgggggtgggagggcagacgcagggcctgagccacaggttgaactcaaggatgcggcatgtcagagacctggaccagagtgggtgctggggtctggagcacctcagcccagctcaggtctttctgtccatccctccagaacagctgttcatgttaatcactcttgggggcagccagtctgaggtacccttgtgtgtgctcggggaggcctcaaggtcttccgaagtgagaggttgtgctgtcaggcctggtcatggcttgaattcactgtatgacatcaagcaaggacctgcctctctctttgcggctcagtttccccagctgtccaatgagagagctggttggcatgatggctgaagggccccttcatcctccaatgatgtcaggagatttccttttatgtgtctaactccctcctcttgctgtggctgaggtcgcagtcccctcctttctttgtcctttgtgaagatgggggacagctggttccccaccccctccccccagtaacctttcagccataaatccatgctgaggcatctctcctctggataaacagccctgatgccttttggctgccctcgtcctattttttgcttcaagcctcagagctggggcccacttgggccctctgcagctgcccagggccccaggaggggtacaaacctgggacaagcaggggcccaaccacccccagtgtgccagggtcgtgggcccctttctgggcctcaccaccttgcactgggaccattatggcagcctcctcctgagtccttcttcctgccaccggcctcaccccttcagtgcatcctccacaccagctgccacagggagcttaggaacacataaatctgaccacactgtcaaattccgtcgctcagagctctttgatgcaaaaaataaataaataaaaatgcctttgatggcgccccaactcctgcaggataaagctccagatctgaatctggcctttgaagcccttcacagtccagcccactacccagtcctgccccactcccctttatgcccctggtggcccagctgcagctggtggggctgcttgggcccatcttcaccccctaccctgccttggagttctaggtcatgctgtccatttcctgtcccctcttgccacctccatgccagacccatccgctctcacccgggtgacagcagcagctcgccccgctgcctcccctgccccttccaagccgttcaagtggtcactatgaaacttcagctcactcacatttctgctctcacaggctccctttgcacttgcaatacaaccctgggtcccttccaagtccttcaaggctctgaatgatctgcctgtccaccctcaccttggaaaactctccccttgttgaccactaggacggcaccttaaacatcccaagctgttttctgcctcatggctattgtatttgctgttccttctgcttggaatactgttccaagggcttcccgcctcaccggcttcttggcactctctggtctcaccttcagtatcgcctcttcagagaggccctccctcacccaccagaacgaagtacacgtaccccattaccctccaggccatacttcttgtttcatgcttaccacttgccacaatctttaattaccttaaaaatgtgtttgcttgtttattttttgcttctccaggggagtgtcagctctatgagggaaggaaccttgttgccatacccctcttcctggcagtctgggtgtcacacttgtttgttttgagtcagggtcttgttcctgttgcccacgctggagtgcagtggcatgatctcagctcactgcagtcttgaactcctgggatcaagcaatcctctcgcctctcagcctcctgagtagctgagattgtaggcgtgtaccatcatgcccagccaatttttaaattttttgtcgagacagggtcttgctatatcagcctaggctggtcttgaactccttggctcaagtgatcctcctgcctcaagccttccaagttactgggattatcataggtgtgagccatcatgcctggttaattttaaaaatatttttttgtagagatgtcacagggagcttacaaacacataaatctgaacacactgtcaaattctcttgctcagagctctttgatgcaaaaaataaataaataaaaatgcctttgatggcgccccaactcctgcaggataaagttccagatctgaatctggcctttgaagcccttcacactccagtcccaactgctcagtcctgccccgctcccctttatgccccagtggcccagctggtctcaaactcctggcctcaagtgattctcccaccttggcctccaaaagtgcagggattatgggcataagccactgcgcccagccttcaaactagcttttatccttcagactcctccgtgttgatgtcttccttgagtatctttcctttcctagacaatgagtgtcttttgttccatgtgtccctcccagctgtagaagcattattcacagagtccttcgatgtctttacccaaagaagaaattccaggcattgggttacattgagggcagatacattttgggctgggatctaaaatcctggagtctcgctctcctgaaatcggaacgaacttcaaaggtcatccagttcagaggcctcagccctggtcgacctctgcctgagtcttccttggtgctggcaggctcactttcctccaaggcagcctctcccgctgctgatgggctgagatggtgaaaagtccccttttgcatgcatccgcatcctgcttcctgtcgctgcccatggatctacttttgaggctacacaagtcacatcagctccctctgctccaggacagctcttcaagtttttttgattttttgttttttgagagggagtcttgctctgttgcccaggctggagtgcagtggcacgatttcagctcactgccacttccagctctcaggttcaagtgatcctcctgcttcagcctccccaagtaggtgggattacaggcacacgccaccatgcctggctaatttttttttttttttttgagacggagtcttgttctgttgcccaggctggagtgcagtggtgcgatctcggctcactgcaacctccgcctcccaggttcaagtgattctcctgcctcagcctcccgagtagctgggattacaggcgcctgccaccatgcctggctaatttttttgtatttttagtagagacagggtttcaccatgttgaccaggctggtctcaaactcctgacctcaggtaatccacccgccttggcttcccaaagtgttgggatgacaggcatgagccaccatgcccagccttttttttttttttttttttttaagtagaaacggggtttcatcatgttggccaggctggtctcaaactcatgagctcaaatgatccacctgcctcagcctccgaaagtgctgggattacaagctcttcaggtattgaaagtcagtatcttacttaagtccttgcaggttatagtatttgttgcaaatcactcagagcattgggtttcctctttgcgttgtcatgtttgtttgtgagcttatctcagcaggaagatgcaccctgggtggtggaagggaacctacgaggaagatctagacccattttgaggcttggtttctcagccccaggttcatacactgagtaggtaactctaggactcagacccacatgataggtgtaagttagacttgctagaggttctgattctccaggctaattctgttggtccctgacaagaaaccctaccttctgagcatccttgaacaatgaaaagaatttttcccactttctgggctttctataaattgctccagcccagctctccagcctctgatgccataggagattaaaatcctattatctatcaggtttggttcgttcacttactaggtatttattgactttctatgatgtgcaggcacttggcaaggtgccggggacacagaccaagctcctgcccttgtgcaggtcttttctagtggcaggaggtaggcaaggtacaatctaagctctacaaagagaattgaaacagtgaggttctcacagagacaatgcggagagaaagaagaaaggaatacataatgtaggattccattcaaacaaattctgaaaatagacaacactaatctctgaggttagaagtcagtattatattgtggatcaagcaagagtcggtataaaaaaaataaaaataaaaaagaagtcagtattctattatcctaggtgagggatggcccgaaggggataatttttcataatttctgtttttgtacagggtacggttttgttttgttgttgcttttgagactgggtctgttgcccagctggagtgcaatggtgtgatctcggcgcactgtaacctctgcctcctgggttcaagcggtcctcccacctcagcctcctgagtagctgagactacaggtgcatgccaccatgcctggctaatttttgtttgtttgtttgtttgttgtagagatggggttttgatgtgttgcccaggctggtcttgaactcctgagcttaagtgatgtgtccgcctgggcctcccaaagtgctggaattacagacatgaggtactgtgcctgacccagggtatgtttactttgagaaaattcatcaaactttataagatcattcactgcagccttgactgtaatggcaaaagactgaaaacaatcgaaatgtctaccgagaggggacccgcgtcatttcctaatggagacacactgtaggactaattcctaatagggtctgggcggctgtaattttgataaatatcgccaagtttggcactgtaatttttttttgagacggagtctcgtactgtcgcccaggctggagtgcagtggtgccatctccactcactgcaagctctgcctcccgggttcacgccattctcctgcctcagcctccagagtagctgggactacaggcgcccgccaccacctctggctaatttttttgtatttttactagagacggggtttcactgtgttagccaggatggtctcgatctcctgacctcgtgatccgccctcctcggcctcccaaagtgctgggattacaggcgtgagccactgcgcttggccggcactgtaattttaaatgtgttcatgtaatatgcacacagtaaagtgcatacatcttagatgtacagcttgatttgttttgcaaagtgcacgcacctgtgtctcatggctctactcagcgtatagagcatttcctgcctcccagaggctctctggtgcctccagccattaccctccctcagaggaccactctgccacttctgtcaccataggcgagttttgcctgttttgaatgtagatggttgaaaatgtagctgggaaattatttctctatatttcgtctagcacacctgtgcatttggaatgggagcgcatcggtcggaggacttcccgtgtgagcctggtctggcctctggctggaaccctggatctggaactccattgttccatgtgtctggcgtctgaggttctcagatcctttcattctcgattctaaaatcctgtggcgtcacggagccctgaatggggtgatggacaggagagcctggaggtgccctgacacattccaaagactgtatcaggcagatggactgccagcgccctgaacctctgtcgagagtgggccacgggaaggtggcttcctgtgaatcttcaatgtggggatctgaaggggctcctaactgggttacatttccttgatttgcttccatttcagccaaacaattccttgattctataagttccagggctggttttcttcatgtatgatttccccagggggtccccagaaagaggatggggagggaggaagagggaaagagggcatcgatgtgctcccacttccaaatgcacaagtgtgccagataaaatatagagaaataagtgcaaagctacattttcagccatatacattcaaaacaggcaaatctcgcctatggtgatagaagtggcagagtggacctctgaggtagggtacagagtggaggcaccagagagcctctgggaggcaggcgatgccctataccctgagtagagccgaggggacacaggtgtttgcgctttgcagatgtctgagaaggatgtccctctccccctacccctcccccctctctctctccctctcactccttctctttttgatctgttcttctccttctctctccttctctttttgatctgttcttctccttctctctccttctctttttgatctgttcttggccattgctcgtctgtgagacttggccaatgctttcctttctctgggcctcagtttccctggatgtatcaagagggttggactagctggtccaatctcagtaggcattctgtggtttcccctctgagtgtccttgctctctgtatctggaggtggggtatttttctgggtgtgtcagactctgcgtgacttggtttctccccgtgagctcttcagtctcctgaacctcttactgccttgtccctgtccccgtcagtctctgcacccagcctccctgtctctcagtggagtgtctctctccgcctttgtgatcccctgacaatgggaggtaaaaatagcccaggggccgtgctggtggagataaaagggaatttgccttttgtgtcctgtggccaggctgggggggctgtgacacgtggagattgctgacatagctctcctcctctgaccttgacagtggcaataaaaggggtagcagagcttcctgccctcaccgtggtgccgaggtaggtgatcagggctggggttggagccgaagggagggcaggagggtgggcgggtgggtgagggtgcccatgggtggccgcgagtcttctgaatctggagtggaggaagccctggtgtttgagggtgtgcatgtatgctgggcactcacccaaggaggctgcattgggagccagagggagtcgcctagtatctggtcttgtgggttgggggatcgtgccctagttcagctcccttgtcactgccatcttccagtgcctgctgccttgggccgccttgaacctccagggtttccagctcctcctccttcaccccagtgccactgccatgatggatgtgagtgaacttggggagtctgcccgctacctccgccagggctaccaggagatgacgaaggtgcacactatcccatgggacggtaagtggagacagagggggaggggtcatagccacagagatgcccttatggactcagaccaggaattgggaggggtggcaccagctcagggctgaaggggcattggggcctgacagctggagccctggacctttcctgcagagtctggggcctggaaattaaaaccccagggacactgtatatcactgtgtgtctgtgagcaagccttggtttgttcccctgtgaaatgggataatagcacctgccttccggagctgcagtttatgaagactcaggctggagcccgaggcctctgagatgagactgatcggcatgtgtgcaggctgcctccgcgtgtccacaaaacttgtgctggggttatttttagtggtttctgcagagccaaagccaccctttattagggacaggaataaaggctgtactatttatgacctggtttgctcataggacaatactaacaataggcagtgtgtaccgaatgcttattgtgtgtcaggcccagagcagatgactttccatgcatcatctcaacaacctggggaggtggggccagcaccagacctagcttcacagggcgccaggctaagagggaccttgtgtttgattcgacactctgctgttgccgtcttgaaagttttaattgttttcaacaaggggacccacatcgtcattttgtactggggtctgtaggttatgtagatggtcctagatggttctagatggtcctgacccaggcacttggcagagcaggggacacaaactccggtttgcagcctgagtccatgcttctaaccaccatgaaatctgggctcctcaaagctctggggacagctggccaggcaggagagcacaggttacagttaggaggcctgggtttgagtcttcagtgaaatagggaaggcaggacccctccctaagagtcatatgcctgatattgaggggctgctctgtatgggacctaaggagatctccataacattttgcatgtgagggaactggcccagagagaatcagggattttcctgaggtcagagggcaaatatggcggaagcaggaattggaacccaaccattaacccagactcatcctccaataaggggatctctagggaccctcccagctccgcccttcctgagcctgggtttggagggttcttcactggaactcctgggtcctggcagaggggctttggggagggtcacagctgtatggataccatggcttgggaactccagctagaacctggaggtgcctcagcccctctctgagtccagagctctctctgcaacccagggaagaagcgagtctgggtgcctgatgaacaggacgcctacgtggaggccgaggtcaagtcggaggctaccgggggcagagtcaccgtggagaccaaagaccagaaggttccgttccccctttcctgagattagcctctctgtccctaggcctcctggccaacaggatctgccctctggttgaagggggtctgggtatgtgggtgggggtgacaggtgaggtcggtcggttcctcccggtcccccggcccctgacacgatctccctggtaggtgctgatggtgcgtgaagccgagctgcagcccatgaacccgcctcgcttcgacttactggaggacatggccatgatgacgcacctgaacgaggcctctgtgctgcacaacctgcgccagcgctatgcccgctggatgatctatgtgagccccaggcccgggccatgggcggggtggggcttgtatgtggggcggggctagagatgaggtgctgggggcgggcccatagcggtggggcggggctgtgagcggtggatcggggctgtgaatgatagagcgggtccatagcgggggtggggctgtgagcgatgaggcggggctctgagcagtgggggcggggctggaggttgggccttgggaccttaggggagcagctgtagcagtgcggggcgggtctagaactcacctgcggactatggaggccgtgcgtgtgggctggggcagggctgtgagcacaagtcaggggtgaggccaggacggccacagagggtgtggtgtggcaagtcaagtagctccttgaggaatatcgcagggttcttctgaagactggggcctggggcctggggatgggaacttgcgtatccctcccaaaaccctacctatggggggagaatgtggtggcccatgcctgtaatcccagcactttgggagggcaaggcgggcggatcacctgacgtcagaagttcgagaccagcctggccaacatggtgaaaccccgtctgtactaaaaatacaaaaattagccggtcgtggtggcacgcgcttgtagtcctagctaccctgggaggctgaggcaggacccaggaggcggaggttgcggtgagccgagatcatgccgttgtactccagcctgggagacagagcaagactccatctcaaaaacaacaacataaaccctacctatactctctcttcagacctactcaggcctcttctgtgtcaccatcaacccctacaaatggctcccagtctatacggcctccgtagtggctgcttacaagggaaagcgccgctcagattccccgccccatatatatgcggtggcggacaacgcctacaacgacatgctgcgcagtaagggccgcctggactcctccccaaccgcagaccccgacctcggtcccgggaggcctctgtaagggacccccttcccccactggcactgccccccttttgacgctgctggacatggtcgcccagccgttctgtccctccgcatgggagctgacctccactagggacagccccacctgctccttcccattcctggctctgggtggtggggtctgccccagatggatacccagggtgttccacctgtggctggccccacaccttggctgacttctctatccccttccctttcctccagaccgagacaaccagtccatgctgatcacgtgagtgtggggctctgggggtggggtggaaaatgctggccatctggcagaaagagggcggtaccacagtcatttcccaggattgaatccaaagtgcttaggccaggacttttaccacctggagctagtgtcccagctgaagctaaattaggcctgagcactttccctgcccccattctgaacagatgtgttcttgatgggggatagggaggggacacccacaaacggagtgaccaccagccccacacctcctctccccggggcctggaatctcccaccttgatcctctggggttctaattctggctcaggggcagcggaaagattcctctgcttttcctcctttttaccatctacttatgtctgaatcttacctctgatctttccattgcctctgtgggaaaatggtagaataattcttacatgccaggctcatgtccagtcaggccaatatggacaatgtttagtgtgagtgtgcatgcgcgtatgcagttaagagcaagtgccttggccgggcacagtggctcatgcccgtaatttctgcactttgggaggctgaggtgggtggatcacttgacgtcaggagttcgagaccagcctggccaacatggtgaaaccccatctctactaaaaatacaaaaaattagctgggcgtggtggcaggtgcctgtaatcccagctactcaggaggctgaggcaggagaattgcttgaacccaggaggcggaggttgccgtgagccaagatcacgccactgcactccagcctgggccacagaatgagactccatctcacgaaaaaaaaaaaaaaaaaaaaaaaagcaagtacctttaacccagacgggcccggctgagtgtggtggctcacacctgtaatcccagcacttggggaggctgaggcaggaggattgcctgaggccaggggtttgagaccagcctgagcaacatagcgagaccccatctttaccaaaaaaaaaaaattgaaaagttaaataaaaaatcctacctaccacacaaagttatgagtcagtgagttgatatatgtgcctggcacacagcagggacagccacagaactcctgaggcccagttccttgttcctaaaatgggggtgataatggagcctgccttccagggttttctgagctgtaactgagccaatggagtaaagtgccgggcactgagttagtccgtagtggacaatggcatcatcgtgtgttgtcatctcacagggatggtctacactggcttgctttgtacacctctgagggttgatccatccttgggggtttcaagctggggggaaggagaggtggagggctctgcttgaggggtgaggcattgggggtgggggagaattaggccagatgggcattggtgactcatgtttgtgtcgtccaagcggagagtcgggggccggtaagacggttaacaccaagcgggtcattcagtactttgccatcgtcgctgccctgggagacgggccgggcaagaaggccgtaagacttgcccactcgggcatgctccccgttgcttctcgctgtttttcttttctttcttcctctcttttttttttttccccctttttaaaaattttactccccagaaccctgagccctgcctgagcctcccaccctggtgggggactctggcctgagcaaggcttgaccacaaaggctgtggccacctgacgcgcctgccttcgccttcccattggtaaacatggaggggtggggccacgttgccgtttctaaatttgtgtaatttttatcttccattgtgaccttcatatattgaaagagtttactagatgggctgcttttactaagcgttgttgtcttggtttccctgacagttacctgctgctgacacattagacacagaggttggctggcatgcagggcactgggcattcccagcagccggggttggcagggcaattttgtgccttgtgatttctgtacagtttttggaaatttctgaaacaatggggccaagtttttttgtttttgtttttaaggcataacatttcatccctagccttggggccagttgttcagagccctgtggctacccctagatgggctgcctttttccagaagcccgaggcctccctccccacccagtccctgctcctggtcctgttaagccttgctttattctgggtgtttttcttgtttttcccctgttttctttctttctttcttttctctttcttttttctttcttttcttttcttttctttttttttttttttttttgccttttcctttttacccatttgattgtcttgatttttgattttcatttcagttttgttttgttttgtttttgctgttgactttttggtcctttttcctccttccctttcctgccctgtcttccaaatccctaaaaaggtctctggggacgtaacagaaagttgggtgggtcaagtgacaggaagagatgtcagggagaggccagagctggcagggacacagctggaagggcagaggagcacctgggcagaaaggagctgggacagtggagcccaggggagagggtcgggcaagggaggggtgggagaggctgcccgcaggagccatggctgcaggaacttaaaagattgatcagctccccttaccttggccccaaatttggccaaacgggctagagagagccctgcacaaaagcactggatgggagtgtattggggggttccacctcccctgcccaatgtccctgtgggtattttaactcttgggctccctggaggtgaatgaatgaccacaaagtccgtggtggtatatctgttccctccagaatccattccttcccttctctccctttcttccttggctcccagcatccggagtagggaagagaaggaaaggaaaaggaagggaaagtgaggatgaggctaggatggggagaaggaggatctgctcaattcacttagtccccctgggtgacacacaggaccgctgtggcgtccaggcggcaggatgctgggcacctgccctgccgctcctgacttgctgtgtggccttgagcagatccactccctgcccagagctaagtctcctcatttgcaaattagggctaataatgggcacctggcagggcctttgtgcgcactggtaggtatacaggcagacaaacaatgaagacacacccagttgcattacaaaggagaggtgtgtaaggtcatagtgggaggttagggcaggaaggttcagaccaggaagaggtctattccagctttggagcagccaggaggccttcctagaggagggggcacttgggctgggctctggagggccctagattttagtcgggaggcccctggggcttggagcagggccactgcatggagactagaaaatgaagggaggccagaggccgggctggggcagaggaggctgcaggtggagactctggctggggctgtgccactcccactttccagcattttgcctcctaacagctgcaggagggtcaggccgaggggctgagggtgggggccatgcattccggtgactaactccacccccctgtcctgctgcccgctgcctcccgctgataccctgccccaccccgcccttccccaccggaggcctggccctctaatgttgtctgtcttcttcccccagcaatttctggcaacaaagacgggggtgagtatggggccaatgtcaatggggcagccctgggggtacccccttcctctgcacaacagaggggccacgggtggctctggcctcccggtgggtaggcaccagaactgacagaccccctcacccccaccgccccagggcacccttgaggatcaaatcatcgaggccaaccctgccatggaggcctttggcaacgccaagaccctgaggaatgataactcctcccgctttgtgagtggctgaggtgggaggggtggcggggatgccgtaggccaccagcggcaggtcgggcacaggtggggacagtgctggctgtgccccttggctgagggctgcccctctgcccacagggcaagttcatccgcattcactttggtccctctgggaagctggcatccgcggatattgacagctgtgagtcaaccccctgcgggcggtgcaggggaaggaggcctgagcccggtcaccccaactcggcctctgtcatcacgacttctgggctcctgcctgctctgggcacttctctctaccccctggctgctgcccagctcaggccacctcacctatcaccagaacatcaccccagcctctgcctggtctccagcttcctctcctctacgcggccatagttttgctggtcatatcctgttcctgcttgaaagctttctctagatcctgtcacctgaggatggagacccaaatcctcatttggccagtcaggctcctgtgactgcacccctagcgtgtccccagtcttctctctggccaccaagagggcaggcctggcccacggccctcctgccccagctgcacagctacacgtagagtgccccatccttccaggcaccccgctgggaagtgccccagtaccaccagctgcatagaccccaggcgcctaggccacactcaagggggccagggacacagaggggcccccacgttggccactccccacattgggctgcatggctaggtcttgacggatgagcgcaggcaggcagtgacggggacagggataggctgtaattcacaccctgacccctacacagacacacacagacacacacggaggctcggccacacacgcacacacgctgacacaccaacagataaaaacctgcacacgcagacaccacactcaccccacacacacgcaaggacacacactgacccatctggccagagacacagacacacaggtacagacacacggctcgtgtgatgacgcaggcacaggggagataccctccccacacaagctggcaggtgcagatgcagcccccctgcacactccctgcccacctctctccctccgcatcgcccccttgggatgtccactctggggaggtgtgggagatggcaggccagcgtcccttctccccagatctcctggagaagtcgcgggtgatcttccagttgcctggtgagcgcagctaccatgtctactaccagatcctctcagggaggaagccagagctgcagggtgaggggcagtacgatgaagggggtgggagtcagaacctggaggggctgcctggcgcttcctggcccccatcaggccaggccctggtggtctttccctccctgtcctggggtctgtggcctctcttccttcttgggacttttggttactttcctgctagggaacagtcctcttagctccagcaacctgccaacgtgttatcgctgcctccaggagcctaagccctaaaccccacttgctgtcctgagactagagaggtcccacccagcaccaaggcggactgatgactgtctaggcccagctctcctctctggcaagcccgttgagggcagagtctggtcttccctgtgcgccagcatctagcatgggatctgggccagagggggccatgagcaacagtcaaaagatgagtgagacgtgaggactgtggctcattcctcagagaaccagaaaaagaagccagggtcaaagtgaaggccaggtcagggcccttcactctcagtgccctcagccttggcaggagtgaggatgagaaacttaggccccagactgggagatgaggtcctctgggagggccctagactcctgctgggcttgcccccgcaggaccccctatgctgcaattgttgtggggagaatagccggtaagcactgcctgaccctcccttctctgccctgtgtccccagacatgctgcttctgtctatgaacccctatgactaccacttctgcagccagggcgtcatcaccgtggacaacatgaatgatggggaggagctcatcgccaccgacgtatgagctctggtgggaggggagctgtgtggacgcctgtggtggaatcgggcagcactgccggtgcccccagctgcatgaatggtcccggggcagtgcctggctggaccctggaggagcccagacctctctgaactcgctttccctgctgccccccagcatgccatggacatcctaggcttcagcgtggatgagaaatgtgcctgctataagatcgtgggcgccctcctgcactttggcaacatgaagttcaagcagaagcagcgggaggagcaggcggaggccgatggcactgagagtgaggggccctaacctggccttcaacttgacccagacctcagcatcctgtccatgatggttaaccccaactcttgtccacaacctttaacctcagtcttacctggccctgcctcctcagctccaaacccttaccctcctgaggctttgtttgctagccctgaacttgacccctcttaacttccctctcctagccccaggctgaggcagtagagcccctgagtgcgcatggtggtgtcctcctcccttaccccactcgtgccctgccaggtgctgacaaggctgcctacctgatgggggtcagcagtggggacctcctcaaaggccttttgcacccccgggtgcgtgtagggaacgagtacgtgaccaagggccagagtgtggagcaggtgagctgcctgcaggccaaacccatgggggacagccgggcagggtcccctccttgccaggtcccagcccagcctccctgcacctccaggtggtgtttgctgtgggggctctggccaaggccacctatgaccggctgttcaggtggctggtgtctcggatcaaccagaccctggacacaaagctgccccggcagttcttcatcggggttctggacatcgctgggtttgagatctttgaggtgaggacaggccctcaccttggcctctgttctctccaaggtagaggacatgggcctgtgggggggcagaagccctggccttctgcctggaagttgggggtgaactcatgcccctccccgggcctccctttccccatctgcgagaggtctgctgagccaggcccctccctcttgtagttcaacagcttcgaacagctgtgcatcaacttcaccaatgagaaattgcagcagttcttcaaccagcacatgtttgtgctggagcaggaggagtacaagcgggagggcatcgactgggtcttcatcgacttcggccttgacctgcagccttgcatcgacctcatcgagaaggtgggtgccgcggcaaggtcactttgaggaagggagggtgtgtgtggtgagcaagcagggatggatgaccatggcttgcatggaagcctgcaagtgtgcatggaagcgtgtgactgtgcgttgcagtaagcatgcatgtgagtgtagttgtgacagcgtttatgtgcttgtgtgtgaaagggcacgtgtgtgagtgggtgtgttggagttgaccatgagtgagccttggtgagtgtgtgagcagtgtgaatgcatgcatcccagtactgtggacaacagctcctcctgggtgctcagaattctgcagctcacaaggccctatttgcagccacaatttcactggatccctagaactgccctgggtgcagggcagggtgtgtttccttgtttttgtgattgtggaacattatgtatatttacccattgtacaaagaatggaagaaagaaaatttgaaaaattggcaggggaaaaaatgtttctccccattcctatcacagccagtcacatgacacttaggttcatttcctcgaaatcctttatccctttttttttttttttttttttgagatggagtctcactctgtcgcccaggctggagtacaatggcaccatctcagctcactgcaaccttcgcctccagggttcaagcaattcttatgcctcaacctcccaagtagctgggattacaggcatgcgccaccacacctagctaatttttgtatttttaatagagacatggcttcaccattttggccaggctggtctcgaactcctgacctcaagtgatctacccaccttggcctcctaaagtgctgggattacaggcgtgggccactgcgcctggcctatccattttcttttatagacacagatttcatttcatatcctactttttctctgaaaatgtattttgaatgctgctcatggcaagagtagttcatgcagtggatgagtttcatacgatgcatttctgcagtcccctacagctgggcgtttaggtgattgacagctttttaaatattatgtcagcactgaagacattcatcttcccactctgcaggttagaagactgaggcttagtgatgtcggagggccccacagctagtgagtgaggaagccaaaatgtgaacttgatggctttttttgacttaccccatgtttgtgtgtgacagccatggctgtggcgggggtgagagtgggtacagagatgccagcttgggtttgccattgttagaagtgaagatgacacctcagtgctgcagattttgcaggaggggactggagccaagccacaaacttttctctgttaggagatgggttcttggagtgggtgtggtgtctgaccatccggggagatggctgaagctggggatctgggaaggctcccagaagggaggtggcctggggaaccaggggttcagtccttccaggatggactggcttgatggtggcttttcaagctcgttctgttcccagccactgggcatcctgtccatcctggaggaggaatgcatgttccccaaggcctcagacgccagcttccgggccaagctctacgacaaccacgcggggaagtcacccaatttccagcagcctcggcctgacaagaagcgcaagtaccaggcccacttcgaggtggtccactacgcaggcgtggtaggtgcttgctggaaccccagccctcggccaggctcctcccgccctgctccaggtctcccacccgggctcagcacctgacttgtctctccaggtgccttacagcattgtgggctggctggagaaaaacaaggatcccctgaatgagaccgtggtccccatcttccagaagtcacagaataggctcctggcgactctctatgagaattatgcgggctcctgctccagtgagtatggagggacaagatctccactctgacaggggcccacagagcgacattccctggagtgaccaggccccttgtctctattagctgagccccccaagtctggggtgaaagagaagcgtaagaaggcagcatcgttccagacggtgtcccagctgcacaaggtaaggccccatctgggagacagaccctccctcttggcagcctccagccccgtccttcaccccctgccctgtcccctgtgccttgggcgggcggctgttaagacttgcagtgatgtttaactcctctccacgtgaacatcacagcaagtctgtgctgcttcccgtccctacgctgcctgggcagggtttgtggggaaggggtgggagccctggggctctgggagggacggggatttggcagggaagtgaagactttggtggtggtgatgggagacagcgaagggtctcccatcaccagaatgagagtgaaagagcaaaagtgcagggcacttagggccctgctcccgtctcggtcctgaccactgcggcatccaattctggttctctgccccctttgtgcctttccctcactcttccccactgccaggagaacctcaacaagctgatgaccaacctgcgggccacacagccccacttcgtccgctgcattgtccccaacgagaacaaaaccccaggtagtcacccagggctggcctggctggggccgggaggcatcatgggaaggtgacagggcagaggccgggaggctgagtacatcttccccctcacctcgcagggtctccactgctgctttttctctggggcctgcgggtgtgcctgttgacctctgaccttttcccctctcacgtccaggggtcatggatgccttcttggtgctacaccagctgcgctgcaatggggtcctggaggggatccggatctgccgccaagggttccccaacaggttgctctacaccgacttccggcagcggtgggtgaccccttccccctgcctgctgctccaggtggaggcctgaggggctgggcaggacacacatatcagagcccaacagacggtcccctgtctggagggggaagcagggactgtgaggggcctggccaggtatcccagcaagacatgggggtggctcagacctggccggggacttggggagaagtgaataggcttggggcaaatagtggaggtggagcctacaggcctcgctgataagctggacatggaattctggatgcagaaaagacgaatgatttctagttttgggagtgagcaacctgggagctaccagtggtagatttactgagctacaaaaacagggttttttgatttggaggagaggtgaagggatactggtttgagctctgttttgcgtgtatcaggtttgaaatgcctccagcagacatcctagaaaagtcatgggggagattgggattatcaatctggagctcagggcagcgggcagaaaggatgcagatttgggagttgaacgagaatcatgtggacgaggcttcatgagacacctggcacatagcaagcacctgggcagtgctgccagctcctccccgttccctcaatgggcaacaagcatccatcgttccttctccctccagaagtcatggtgtcatccacactatcctttgtaaacagaggttcacacagataccatacacgcacacacacgcatggtgctgtgaccttgttttttctaacagtctggcctggagatcgttccttatccccaggcgtatgcctgccatcgtcatccgtttttcttggctgtgaaacatctcacagtctggtggactgcatgctttgtttaatgagtccccctcatgaggggccttcacagcgtggctgtagcccacctgacccacacagccctgtgcatgtgtccacttagaagtgggcaggctgggagccctggctcttttgcattagaatttccccccaaatgggctgggcgcggtggctaacgcctgtaatcccagcactttgggaggccgaggcaggcggatcacgaggtcaggagatcgagaccatcctggctaacacggtgaaaccccatctctactaaaaatataaaaaaattagccgggcgtggtggcgggagcctgtagtcccagctactcgggaggctgaggcaggagaatggcctgaacccgggaggcagagcttgcagtgagcagagatcgtgccactgcactccagcctgggcgacagagcgagactccgtctcaaaaaaaaaaaaaaaaaagaattttcccccaaatgtttcttcagtgatagggtacagcatgtcaccttctactaatattttttgcctttaaaaaaattttaaaaatagtgcatgccttctgtaaaaagcctctttaaaaacttaatgaatgcatttaaaatccccccaaggttgtgtttttttttttttttttgagacggagtcttgctctgtcacccaggctggagtgcagtggcaggatcttggctcactgcaacctctgccttctgaggttcaagcgattctgcaattcttctgcctcagcctcccgagtagctgggattacaggcgcccgccaccatgccccactaatttttgtgtttttagtagagatagggtttcaccatgttgcccacgctggtcttgaactcctgggctcaagcaatccacccgccttggcttcccaaagtgttgtgattatgggcgtgagccaccgcacccagccaaccccccagggattttaagtggagtgtccctagtgtcccagtgtggtgacgcatccctggcccccttgtttggcatgtgccctgctggaacctctgcaccagcctcggagaggcccaggaacgagtcccctgctacccacacgagcctcctcagtccctgacttccccattctcagtggcctgtgccccatacccagccctctcctgaccagctctgccctcctttcccaggtaccgtatcctgaaccccagtgccatcccggatgacaccttcatggacagcaggaaggccacagagaaactgctgggctcgctggacttggatcacacccagtaccagtttggccacaccaaggtcggggcactgtgggatcagggctggccatggctgtggcggtcacactgggcagggttcatgcggatggttgggggttaccctggctgtctacctctccgcccccaggtgttcttcaaggctgggcttctaggcgtcctggaagagctccgtgaccagcgcctggccaaggtgctgacgctgctgcaggcgcggagccgtggccgcctcatgcgccttgagtaccagcgcctgctgggaggcaggtgggtgtgggaaggaggctggggacagggtgtgtcccctgcctctcagctcccagacccactggctctcccaaccctaacatgctgccctgtagtcagatcagcccctgtggctggttggggcaaggttctgttctgtgtcccccagcctccatttccccacctcaaaaaacggggtacggcacttgcctctccatttcaggacatcagcgtgtggcccggaggggtagcgatggcacccagtgtcttccaagactcttgcgggccgggccccaggcaagatactttctctgcattatcctggttaaagcgctgacggtcctgagaaacaggcgctgtgatggcctccactcagcagaagggtgcccgtgtcagagatccagagctagctggcacgtcagcccaggccgctgactccagagccccgtggcttaacagccctggtgtcttccgggaattgcagaggccaccaggacatggggggctcatgagccccttcactggaggcaggcctgtgggactgtgggcctcccctcaccctcacctataaagcagagctattaggagctactccatgaggctgctgggaaggcaaaacaagtgaactgtgctgagtgtcaccatttgtgacgggcagcactgagccaccttcacagcttggctgcccctccctagggatgcgctgttcaccatccagtggaacatccgtgccttcaatgccgtcaagaactggtcatggatgaagctctttttcaagatgaagccgctgctgcgctcggcgcaggctgaggaggagctggcggccctgcgggcagagctgcgggggttgcgaggggcgctggctgcggccgaggccaagcgccaggaactggaggagacgcacgtcagcatcacccaggagaagaatgacctggccctgcagctgcaggctgtgagtcagggttccccttgtgaccgggcgtccccagccccgagtacccctggctgctctgagggatagtacagcgagacccatggggctcaggccttatgtctctctgttccaaagatgccatgagatgaggcctccatgtcccagcctcaccaccccaaggcctcgtctggcacgtttcctggcactctcccctcgtgccaccttggcctcccgctaaagcagaggaaccccagctccccagctctcccctccctgcaatccctgaaaccaaacagacccatgctctcttctctggttaagggccatgggaacccaggtggcaggtaacagggtgatagccagagagcacagatcaaaggtctggaatctccccaggtccacagagcaagctttcctgccttcggcacatggctttgtgtatcaattgtgtgccaggctcaggctagtgcaggaggaacgttggtgggaagacagagatggccctgtggtcacaaaactcacctgctagtgcaggagactgtgacgcagctggacagtaaggaaatggggggtaaggatacctgagcccttccagggactgcctccaggagcccgtccgtggctgtgcagaggctgctgctgctcaccctgcccctcggaaggcctcagcccaacagcggggcagtgagcagcgggcttccctctcagaacccttgtttgggcctcactctgggccgccccgcacttctaactttcccctcttaatgctctggtgtgtccctctgcgctattgcccttccatgcccaagagcgagtcaagacattcctgagttctcagagcacagccaaactttgctacagaggcagtttcctctccagggcctggcctggtgtctctctgctggtttacctggccctcccccaacctggccccgttccgtgtgccctccaggagcaggacaacctggcagatgccgaggagcgctgccacttgctgatcaagtccaaggtgcagctggaggggaaggtgaaggagctgagtgagcggctggaggatgaggaggaggtgaacgctgacctggccgcccgccggcgcaagctggaggacgagtgcacggagctcaagaaggacattgatgacctggagctgacactggccaaagctgagaaggagaagcaagccactgagaacaaggtgtgggccgggccagctgtggggaagggccctgagccaggggccagctttggggccaggtggctgcaggtcccaccccggctctgctaagcctctgctttctggccctgggcatgtcactgcctttcctgggcctcagtttctttatctgtcaagtggggttagcagcacttaccccattagggtaggtggtgatgtgtgtaattggcctttactgagcacacgctcctaggccttgcacacggtaggtgtttagcacatgctggcaatcctcatccatcccggagtgcaagccccttgagggcaggaactccatgtccccagctcggcatcccgcaggtgacttctgcccttgagccctcgtgatggcccctgtggttcccagtgctggaggagggactccattacacaggagggaaagtgaggcaggggtaggcagcttaggttctcacaggtgctcactgaggaagccgggactaggaggcagctgccctgagcacatgctaatactgcacatggctggcatctgtggatttctcaccaggccaggtgtggtgctgagcactgcgggtgcatccactcgtgaatcctcattacaaccccatgaggagggtccttccctcaggcagaagcggtggaggctcggagtcaagtgacttgcctgagtcccatagctggaaggggcacttgctctgacctggtgtggtgtggtggccgctcagagtgcggggaagggcgtccccattctggccctggccctggcacaggtgaagaacctgacggaagagatggctgcgctggacgagtcagtggcccggctgaccaaggagaagaaggcgttgcaggaggcccaccaacaggccctgggtgacctgcaggccgaggaggaccgtgtgagcgcgctgaccaaggccaagctccggctggagcaacaggtggaggacgtgagtcagggccaccccgagactgggtggcggggccggggtgccggctggcttgggccatggctgacccctgctgtgcctgctctgcagctggaatgctccctggagcaggagaagaagctgcgcatggacacggagcgggccaagcgcaagctggagggtgacctgaagctgacgcaggagtcggtggctgatgctgctcaagacaagcagcagctggaggagaagctcaagaagtaggtgtggtggggcagcaggtgggggccttctgagcctgcacctggcccttgttcccttctggattcttgtggttcctgcggcattgcagaggttaagggtgggggttgacagatggggcactggggtgcaggggtagtgtcttgccctccctgtactgagggccctagccagggtccagggctgaggcctcagggcccagtgcagcaggtgcatggggtgaggtccctcagggcctgaaggggactggggggcgttatggggtcccaggcgggtgggtgggagttaaggcctgtgctggccacccactctgtggctcccaggaaggactccgagctgagccagctgagcctgcgggtggaagacgagcagctcttgggggcccagatgcagaagaagatcaaggagctgcaggtgcgtggggatcgggtgggtgaggcctggggtcagaggcccacagaggtgacagctgccccacgtgcccaccccaggctcgggcggaggagctggaagaggagctggaggcagagcgggcagcccgggcccgcgtggagaagcagcgtgcagaggcggcgcgggagctggaggagctgagcgagcggctggaggaggcaggcggcgcatccgcggggcagcgcgagggctgccgcaagcgggaggcggagctggggaggctgcggcgggagctggaggaggcggcgctgcggcacgaggccacagtggcggcactgcggcgcaagcaggcggagggcgcggcggagctgggggagcaggtggacagcctgcagcgggtgcggcagaagctggagaaggagaagagtgagctgcgcatggaggtggacgacctggctgccaacgtggagactctgacccgcgccaaggtgtccgtgccttcctcaccccatacccaccctgactttaaaccaatcccgatcccagcagccaatactgttcccacaccagcctccacccagtaccttatcctgagccctgacctcttcacctggtacacaaccctcatttctcagcctcctaccagtcctgaccttaagccgtgactcccaagccctgttccctgactccaggtcatttctgatccagcatctacttccagcctcagacccttgaaccagcagtagttgtgaccctagcccttgactcctgaactctgacttaatacctgtcctctcttcctgtcctgaaccccagcaccctagccttaacccctgacctttctaccacataatcctgacagctgacctctgaccattgtccccaggtgactccgcagctaccatcccaactctcaccctgacccactgccctgggactggcccagccctgtcagttctgacacctgttaagcccagcagtagaatctctttccctgactttgaacttggggctctgctctccctttgattcctgggcccacatctagcttaccagtctctgatcccagatcctgccatctgatgcacaaacttgttctgacatctaactcctgacccctgactcccaacctgggatcctaggccagtgcagagaagctgtgccggacctatgaggatcagctaagcgaggccaagatcaaggtggaggagctgcagcggcagctggcggacgcaagcacgcagcgtgggcgactacagacggaaagcggtgaggctggggctcagctggccacaccaggcagggctttggtgcagccctcaccagcctgacctgtccgctcgcctctttgcctgcaggggagctgagtcgcctgctagaggagaaggagtgtctgatcagtcagctgagccgtggaaaggccctggccgcccaaagcctggaagagttgcggcgccagctagaggaggaaagcaaggtgggctggcaccggtgaccatggagtgggcaggtgggcaccagagccactgggctgcactaacgctgaggtcactggtgtccctgcaggccaagagtgccctggcccacgccgtgcaggctctgcggcacgactgtgacctcctgcgggagcaacacgaggaggaggctgaggcccaggctgagctgcagcggctgctgtccaaggccaatgccgaggtggcccagtggaggagcaagtacgaagcagatgccatccagaggaccgaggagctggaggaggccaagtgagtgctttgctggccaggccactgccatgcagagctttatgcctgtgcctgagccccgctgagggtgggtgaagggagctgctggggctgttctccctccttccatggtccacaccttgtctggttccatggcctagaaaaaagctggcactgcggctgcaggaggcagaggagggcgtggaggctgccaacgccaagtgctcatcgttggagaaggccaagctgcggctacagacagagtcagaggatgtaaccctggagctggagcgggcgacctcagcagctgctgcgctggacaagaagcagcggcacttggaacgggcactggaggaacggcggcggcaggaggaggagatgcagcgggagctggaggcggcacagagggagtcccgtggcctgggcaccgagctcttccggctgcggcacggccacgaggaggcacttgaagccctggagacgctcaagcgggagaacaagaacctgcagggtaggacctgccacacgccagggccagggtgctgccctggggtcggagcaactttgagttatgggggtgccctggtggggccaccctggaatcaggggtgagtggagtgacctgggtgggagtacaagccatgggggtggcctctcagcaccctgtccactgcagaggagatcagcgacctcacagaccaggtgagtctcagtgggaagagcatccaggaactggagaaaaccaagaaggcgctggaaggcgagaagagtgagatccaggctgcactggaggaggcagaggtcaggggctggctgcaggggtgggtggacactgacctgctgctccactggccatcccccccccccaccctaccctgcctgctctgtatccacagggggccctggagctggaggagaccaagacgctgcggatccagctggagctctcccaggtcaaagcagaagtggaccggaagctggcagagaaagacgaggagtgcgctaacctgaggtgtgtccatccttctcccgtccccacctcccgagagcagaaggggagggaagcagtgtgtactctgctctctagtctgtccctcccatgggactttgaggtccgggttgctgtctccattctagctgtgaacctcggagatgctaaaggacttgcccaaagtcacacagtgggggtggagccagtcagtccacctctgtctgcctgggcctcactcttgtccatgaacttgctctgatgggccacaggcagtcacaagagactttaaatcggggaggggtgactcatttgttctcaaaatgggttcgtttccaacggtccttgggcatttgtaaggacaggtatgcccttacgagaccccctttcatgccaccctcctcccataggcgcaaccaccagcgagctgtggagtccctgcaggcctccctggatgcagagacacgggcccgcaatgaggcgctgcggctcaagaagaagatggagggtgacctcaacgacctggagctgcagctgggccatgccacccgtcaggccacagaggcccaggctgccacgcggctgatgcaggcacagctcaaggaggagcaggcagggcgggacgaggagcagcggctggcagctgagctccacgagcaggcgcaggctctggagcgccgggcctcgctgctggctgcggagctggaggagctgcgggctgccctggagcagggcgagcgcagccggcgactggcagagcaggagcttttggaggccaccgagcgcctcaaccttctgcattcgcaggtggggacaggagtccctggggacagagcaggtgcaggcctgctggctggctggctctgagactcctcttcccctcagaacacaggcctcctaaaccagaagaagaagctggaggcggacttggcccagctgagcggggaggtggaggaggctgcacaggagaggcgggaggctgaggagaaggccaaaaaggccatcactgatgtgaggctgggcaagggctgtggggagcctgggacagaattgcagagggacttccctgaggctgggcacctgaccagctcctcctccccaacaggcggccatgatggccgaggagctgaagaaggagcaggacacaagtgcacacctggaacggatgaagaagacgctggagcagacggtgcgcgagctccaggcccgccttgaggaggcagaacaggccgccctccgtggcgggaagaagcaggtgcagaagctggaggccaaggtgtgtgcagcccctctagtccttggcgcaggcagggtgggtgacccaggggtgggcttggcatcaggctgtccccctgcctgcaggtacgggagctggaggctgagcttgatgcagagcagaagaagcacgccgaggcccttaagggcgtgcgcaagcatgagcgccgtgtcaaggagctcgcataccaggtgggcgacagggtctccctggggagtggccctggagctggcccagcccaagcaagccctgagtcccccttgcccgcccaggccgaggaggacaggaagaacctggctcgcatgcaggacctggtggacaagctgcagagcaaggtcaagagctacaagcgccagtttgaggaggcggtgagtgcgctggggcctggacacctggaccgggcaccccagctctgccccagggtctgtggccaggtgaggcatcagcagcagctccaccctccaaggtcagtgacccagagggaagagagaagcttctaacatctctggggagatcagacctagctccttctcatggaacagaccccatgtgctttcccctggccaaggctggggctgcctctgaggggtggggcaggcacaaaaaggcacatgaagttggtgcgtcccaacttccttattcccgctgtggtattggtgaggatggacagtggcaataggaacaaagttgagaaccaggaggagctagctcccttcttggactggggcagggaccagaataagcatctcagtcacccaagcggaaccaaggccctgtgtgtgcccccaggagcagcaggccaacaccaacctggccaagtatcgcaaggcccagcacgagctggatgatgcggaggagcgggcagacatggcggaaacccaggccaacaagctgcgggcacggacccgggacgccctgggccccaaggtgaggagtggcaggggcattgctctctgtgcagggggactgtgggggctgacaggtagtactgctcactcagctatccctttctcctcagcacaaggagtgacggcctgaccccctgggctctaaagaggaatgtctgctgttgcacatctggctgaggccacctgccccgatcctgccatctctgcatcgccccctgctgccttcagccttccctgggccctgaataaacaccacagccagtttccttctcattcttttctttggggttcaggaggaaaaacacagtcctagggacaaaagccaggtccacagcagtcatttttaaaataaagttatttaatagtctccatttaattggtttatttgctgttaataaattggcaacacaaggaagggccccatgtccaggctcaggcaggagcggctgcctcaggcagaggcagggcaggcacagctgccccgtgccccaagggatggagggaaaggcccctcacttctgggagaacccccttggatgaacacagcggccaatgagcaaacagaaccagaggagctacaggaaaatgaggcagaggggcaggcttgggggaaggcagcattctctggtacccaccacccctgcccagggctcagaagcctttgcctgggtccaaaggccagggacaagggaggcttggctcacagatggggggtgggggtcacccatatcttcctccccactctgggactgactgacagccaagaaaccggcaggagctcacacagagctaatgctaaatgtcctcttacctctgggtggccctgggccccagggttctgaaggaaaggtgggcatggtaccctgtcctcattatggggactgaggctctccatgacctagggccctcagacccagggggaccaagggcttctaggacttccctcccaccaagcctgtacccaaagacctggggcaggcagagagcagcagggaggaacgggaacagggcagggcgtgtggcatcgtacccacgctcacccacactggcccagcagcctcccgaggcctggcccaaggtcactcctcagtgaagtccctgtctatgtccatgtagggctcctcaatgtagctaacgagagcagagggtgactgccggtccgggttcaacaggatggacactgtctccttccagtatgagaagctgatgcaggagctctgggcaaagagggaggggctggggggcgcctggaggacccaggtcaagcccagcaccgggacacccctctgagaggccctgggtccgcggcccacccatcacccccttgagggtggggcactcacgttctctaggcaggtgctgtccttgtccttgtgcaggtagtgctgctgccagaagcgcagcaggttgtggaagttgttgagcaggaagccggggtacttcttgctgtgctccatccgctgcagcagccgcaggtacaggggcagccgctctttccgtcgggccagcatcaggatcaccaggctggtgttgaggcagctgacgttctcctgcaaggccacaggcccacagggtcaggggctggtgggagccccagtggcccctggtgaacctgggtagccatcaggcagggaggagagtggccccaggcctcgggccacccacagagctctccctgcacagaggtgagataggactgggggaagggggcccccagcagccccagtttcctgactgagcaccttcctcttccccacgcccacctcccaccccacctgaggcaacaacacctgtccctgtccagacctgggctcaagcatcactccttccggaaggtccgtcccaggcagggctgggtgcgtgtgttggggcggttatcccgcttcagaagtgccattcagcactagcctgcgcgcctcggtggggaaagagttctgccccactcaccatgcactcccacctggtgcttcacctcagaacggaaccaaagaccacctctgagaggtgctaagatcaccctcactctagaaaagaggggcaggaggctcagagaagggaaggctgcatgactattcagtgagggagttgggcagcctcaggtccgattccaaagcccagcagggcagaaggtgtgagggacgtggacatgggggaggcggggagagcactggcctgcaagtcagcctgtgacctgagggcacttgcgagccctccttccttaggccctgtctgtacaatgggacactgattcctcctgagcacagtcctcagaagagctgggtctccagagacgcacttctggagtgggggacagaaacctgctgggcaccaggacaaaggaagtggtttccaatcgaccttccctgctgtgtgtctgccggggcctctcacctgggtcagcgtctgcacgtggatgatgttgatgaggcggaagaggaaggacatctgcgtgggcacctgggatatgtaggcgagcaggcggcattcagacagtacctcggcaactgtggagggaggcaggggtgcagcaggtcaggcttaggcccagtggctgggtcgcccaggcctttcgtggagccccgcttgggtcctgactctgaagctaggagctcatcatcaaaacagcttcaacgaaagctgactgtggcagaaagaaggacctccagctgtcctgctaccaggcaaagccatgttctcagagtgcccaggagcaccccacctcatcctccagaaccaagctcagggcagctctccctcagccctccccagactggctccagacccgtgccctccatatcacacacagaagagttccctccacaggaagatggatccatgacgctgcattaagaaaaacaacgcaaaagttccactccttctgcagaggtcctagcgcaactggttttccacaccagctctcaggtgagtccggcccagtgctgagaccacaaggcacaggttctgctccgtccactagtgtcggagcaactgcttcccgcacaactgggaggcagggcaataaccgaaggtaccaaaatctgtgtggctgttcccctgaaacagaccctctggggcagaaaaaggaagcaaacggctaaattaccaacaaccgggatacttcttgctatcaatgacagtgaccgtgacaaggaacaagtgcctgactttttgggggtgtgggggggtcacaaaccctcaggagaatctgctggatgccacaagccctctcctaggaaaaaaaggaaacgcgtgcgcatacacatggaagtgcgttagcaagtccaggagggttcagatgcctgctgcaccacagggcacctgcgatgccacgcacagcacactgaggacgagggggccaactcatcgtgccaggcaataccagcccagaagaggaaggtctttttctggttttctttgcatcttgctagcaacaatggattttcaccttattaaagtgttgaacaaggcagcaaagccaattgccctggaagccgccaccttgaggccggccacgtgggcatctggtgcagctccctcagtcattcttgtctccctgctggagacagggtgtctgatgccagcattcttaccctgcatgacttgccttgacagcctgcctttcatgtacctttcatatccacctggttttcaaatcggtccagggacagagtgacacagcgcaccagcatgttggagtccaccagggagctgttgatctgcttcaggaatacctggaactatacagaaaccaagctcacagcaggcagtgggctgctggccaggtatggccatggcccggggggatagtcactacaaggggcatcagcgacctctaccagccccactgcttcagataggaagacagaggctcagataagctgagggacctcccctcaccacccaggtactaagaggcactccccggaattcagcacagatccgacactctctccagtggttttacgctcaagggtgctggattcctttaatttttacttttaattttacttcagctagcctgagctgggtttctgtcacacacactcggtgagcctaacacaccaggcccagtccctccctacagcggctcccaccgtggcacccaccatgctgcgtcacggcaggcgcacaagccacccattcccaccctcactccctacccacaagcagccccggttttcatccctgcattcccagggtctagcacaaagccagacagagcaggttccaatgaatgtttgccaaagactgcccagactcccccgtcgtctctaacgtaaaacctgtgcctaaagcctggcagaccaggactccaggtgaacttctggacaacccagcacactccacagagccctgggttaactttacctttgcatcggtgttgatatatttattgaatctcttgaatgcatcaacgttgaacttcatcagctcccccaggaggtcaaagtaactctggagcacatcccttgacttacactcgctgtccacaatgcagtaaaggatgtgctgggtgaggagggacagggtgaaggtgtcaacgtggctgcccccaccagggcctggcatggagctcagaccatgcattggctttgagcaagcatcctggggatggaactggcaacactgtctagattcttgtctgaggatgctggtggctccaaggacaggaccaggcctgacagacctcaccaggaggtggagcagactgggaatgcagcacaatctctcccctgcccagggcgtacagctgaagcctgtgacctgctctgtggtcaccaagatggccggggtgctcagctcctaggtgaggggagctgtcatcaccaggtctaaaacacaggccactgcctaagcactgaggtcattcaagtaaatgaaggacagaatttaaaagcaaaggacacattttgaccccatggtttgtctttgtgtttatgaacgaaattgtttaaatagagtttacaccaaaatactgagttttcatcaagagaataaagccaatttactcctttataaagttttctacattttcttgaagttacattgatttggatcaattcttttccacatggattttataattcgtgggtcagtttcttgtccatatgaaaaaatctgaaagaccaattataactttggccattctgctctaagttttactttttctgaagaccattattcaataaaggaaaattaacttttagtacaaaatatcttcagggtcaaaatgccttgctgggtaaccaaactgtcaccctcctgcatggcctggccaccctctaaacctgtcaccccgtaagcacccatggggaacccacagttggaaacccagggcaaaatctaaggcagcctgcacaggcatttggaagtcacgagatctgctctgctcctgatgaactgtttggggctcaggacaggacacagcaacgcgtgggctggggggagacggaacccaagacactggctgctccagatcatacctccaagaggcctcgcttcagcaggaacatctggtctgcataggaggtggtccctcggaggaaactctccacagcccgagcttgccaaaacctgcgacccaaatactggctcaggtggctaaggctgccctcttccggcccatgttcagttctccaaggggttgggagatgtttgttgccttttcatgtactcaacatttactgaacatctaccaagcatcaggcttcatcctgggcctggggacacagcagtgcccccatcctcacagagagccagctcagtggagaagtcttctatctgggtctgtctggaaggggctgtgtcacagaaagggtaacatctgggatcgaagggctggctcctgcgagcccccgtgaaacatactctaggccttgccctttcacaagaatgggaggacgtgcaattgaggggccaggaatgtgtgtgggaagcggacgaacacatgcagacaggccactgggctcacagacgatgggctggcctagggaagtagtggttgatgctgaccgagggacccagagggcacagcgggtatccacgacagggagtttggacaaggcactgaagtgacaaaggcccatgtgggcatgaagcctcctgacagctcacgcccggccctgatggaactctacctgtccactgacttcaagactcatcttagatgtatctaaggacctcagagaaggtctccctgtattcacccagcccccagccctagcagcggaagaggctttcctttgctgctatagctcctgggccaaccctggctccattccttcccacactgcattgaaacagcacagctctagggaattcatggcagggcccgtatcctagttctctcccacccataaggcaccagcacagaacaggtgcttggtgaatgctcggtcactgtgggctgcagaagaagctctcacatacctgtcgagtcaaaactacacaagatggcagtcaaaccacctctccccaacagtaattgtgcttcaggaggcatggacgctggtgactaaaggaggtattcctaacctcctgagaaacacctggctctgcagccccgcagaatcggcaggtacttttccccagactcacctgaaagacgactctgctggctccttcttcatgacctgcagcagacgagttaataagcccctcttcccatcacacaccaaactcctgaaatagaagagagatattggtgacagatctgagaggctgacaggggccctggggatgggtcattctgctggcttaggcggtgaaaaaccatggggacatttccaagtctgcaggatgccttcctgctccaactgggtccagagccccggagacccctgcagccacagaattaaactgccaagtgcattcccaccacatctcaggccagctttccttcccaggccagaaacatatccagaatcagacatggcttagaactgccagaggagagctgtttataccaaaagtgtgttgaaacaggtcatgccagtctgccagatggggaaagactctgccaatagggtgaggcccagcgtactccgtgcctgaggttcacttccagctggccttgggcaagtgtccacaactccaagcctcagcttcccagtctatgaagcaaaggcaggagatgaggaaatgactctggccccgtcatgggggaaggaagacggccaggcacgcaggggtctgggcccttcaaacagagcagctctgctgtgatccactgcagacatcagggcaggactgggtacaattttatttgaatgaagagttctgctaccttagaaaaaaaagattgggaggccaggagaggtggttcacacctgtaatccctggactttgggaggctcacttgaggccaggagttcgagaccagcctgggcaacatagtgagaccccatctctacaaaaaaaaagtaaaaacactagctgggaatggtggcgcacacctgtagtcccagctactcgggcggctgaggcaggagaatcacttgagctcagaagtttgtggctgcagtgagctataacaccactgctctgcagcctgagagaaagagcaagaccttgtgtctaaaaaacaaaacaaaacaaacaaacaaaaaaggttgggaaatcatggctcttgttggataaagtccactgtattctgacgcctgtgagactagccccccactgcctggctccaggtgaggcaaacctaacccaggtaatgcaacctaacacttggcagcaggtaagaggcttctgtctgtcctgcttggctgcagatgccaccaggcaagaaaggagcacataagcaaaggggctgaatgcacgagacaaggcggtggggcagtgcggagcacacatgacttctggcaggtgacctctctgaggctcacctcatctgtcaagtgcaggtactgatggggctcccctcctagggctgctgtgaggctccaatgagaaaatgcaggtgacatgaatacaatgcctggcacacaggagccctcaggacactgtagctgcatgtgagagaggacacgcgtgcatacctggatgtgctcaccggtgagcccccggggaacgtgggcagccgggatgggctgagggaaaagctgcacccctgcactcacctgtcggtgttgaggacagcttccacctcagggatgttggccttgagagagatggcactgagttcattcagctcctggttgttgagtaacaagtacttgttcctgaaacaaaatgggttggaggaggtaaaggacaggaactggggctgctgggtcagcaccaggctagtgtagggagtctcctgcccacttcctgtggacagaatctgagaagccaccaggcactttcctctagcacctctcactccagccagcacctgcaggagggaactctgggctctcaggcagtggaatctctccctggccccacccccatccccgacccctgcctgccacattcatcgacaaggccccttccctcagcagctctgggcctttctctttgcctacatttccacttgttttctcaaaggcaccaacacctcaacaggtccaatcacactcaagcctggccctgctgcagcagtcccaccaagcaccacggtcacacatcacacagaggcctggttaactgtgacacttcccccgacttgccatccaggcctgtcactgctgggtcctgtgttcccaggacaccagctccctttactaaaaggtatcccacaggaactgagtcatcacacggtgccaaaagtgatcttcagaatcaggactctgatcctgtcactcccggtgaaaacacttccacagcttcccactgcatttagaacagacatttcctgacttaggaggaggttatgtcctgataaacccatcgtatttgaaaatgccgttaagttgaaaacatattgaggccgggcgcggtggttcacgtctgtaatcccagcactttggaaggtccaggcgggtggatcacgaggtcaggagttcgagaccagcctggccaacgtggcgaaaccccatctctactaaaaatataaaaaattagctgggcgtggtggcacacgcctataatcctagctactcaggaggctgaggtagaattgcttgaacccagaaggtggaggttgcagtgagccaagatcatgccactgcactccagcctgggcaatagagcaagattccgtcttgaaaaaaagaaaaagaaagaaaacacatttaatatatctaacccactgaacctcctagcttagcctagcctacctggaatgtgctcagaacactgacttcagcctacagttggccataatcactggcaacacggcaggcacagcacagagtactggttgtctaccttggtgatcgtgtagctggtcaccatttttcttgaaatacattctgagctgcagctgcagctcagtgcccagcattgcaagagtattgaactgtttatcatgagcccaggaaaagatcaaaattcaaaattctacttctgtaccattgtgaagttgaaaaattctaagtggaccatctgtatataaaatccaggcctgtgactgtgacccacaacaccctgtgactgtgacccacaacgtcctgtgcagcccagcccagagccaagcccacatcactcccatcagctggccacaatggtcttccctcgttcaggggcttctggctagaacacacaccctctcacatgcctgttcactcaattcactacaagctgacacttcaggtcttggctggcaagccacttctgcaggggagagttcctgagtgtcctctggccagtcctggaccctgtcaaatgtctctcacagaccccgttcctctcctcctgaataccatctccacttatcactaatgctcaacggtggaatccttggatgaacaactgtctctgttttcagactctgcccttcatgagagcaggggccatggctgtttgcattcatcctgatatcccacagagtactcagactgaagagtctgatgaaagccagagactcacttcctcagggaaaacagcacagttccataacatatgtggtgccatttttcagaaggttaacatgcttcctggagcccttctatggctttcagccggaaaacctctcacagaggatgggtgcatatgatggaggtgccctggggccacagctgtctccaggcatgttctgttagctcaaatgcaaggtttttaaaatatttaaaccaacatttaaaatcaggacctttcacataaatcttaatttctgcctttgcttggcagaaaaaatcagaagttatgcaacagtgggcccagtttcctgtgcacacgcagctggctggagctgagctcactgaaattcttgttcactaaggtccccacatcacctccccaatgccaaggtcaagggtcagctgctagtcacccccttcctgcactgttttccttacagcagagagtaattttccttgtacattctccatcgaaggttaaaaaataaatgagcgcagaatgtctttcaagaaaaatgggagcacacctccttgtggagggaagaatcctccagctgctcagtaagcagtcggctttgcctgtctgaagttcctgccggcccctgggaatagccacgctgtccactcttgctttagaggggcagtaggttgagaaatccattgattccaaaggtagtaaggggccaacgacttccatactcagttcctggggtggctatgagggttagaagaaagcttggggcagtgcctgccataaggaagtctggaaagacgggaggtccgactgcagtgtcacacctgctaacactgaggggacagtgggcttccaccagctccagggcctcctctcgagctgaggtcagggaccagacaaggagatcgaggccttccgaagacagcccaacaactctccttgcagggacactcttgtacttactcgtggtggtcactgaagctctgaagaagcctcaaaaactgtatcttcaaggtgatgtcctgaaacacatgcacagcctcaatgttaggaccacagccacaaggttccaaaataacacaagcagacactctggtgggagcctgcttctctaagcctctgtcctcatgtaccatgaggacttttctttagttagaaaaccatctgttcacttccacatctgatcaacagcagattaagctaatgtggcccccttcctgctaaaaacatgccatcacactcaataaaaaataaggcggggcgtggtggttacacctgtaatcacagcactttgggaggccgaggcgggcagatcgcttgaggtcaggagcttgagaccagcctgggcaacatggcaaaccctgtctctactaaaaatacaaaaattagccaggcatagttgctgcgcctgtaattctggctactcaggaggctgaggcaggagaatcacttgaacctgggaggcggaagttgcagtgagccgagatcgcaccactgactgcactccagcctgggtgatggagactctgtcccaaaaatccaaccaaccaacaaacaaaacaacacgtgtggggaggagcgggggaagtccataggagttagaaatgaagaaaggaccgaggagtttggaatagtgagccaaggaactgatactcagcagctgtgggcagtgtggagaggtggagacaagacctagtcacactaaggcttgggttttaatgccctgcagggactagacagggtgtcaggtcccagtaaagcctggggagcatgtacacttggtgaaagaagggttagaaaggcctgacccaccagcccagggagcctggctctgccatggtgctgctggtgggtgaagggggccctcccaagagcagcagaaaccctgggctcatacgactggggcagtagggccaagacattaaataagaaaactggccctgggacagctgccagacaaaagcaaaagtgccctgtagaaatgcctccagggctgaggctacacaggtatccaagggggaaactaaccccactgacctcaagtgatctgcccgccttggcctctcaaagtgctgggattacgggtgtgagccaccatgcccgggagcacgtttctataggtggatgaaaattacaataggataaaacagcaaataaggaaaagcaggctgctagctcatgcagtgggcagccccctccctgcctggagtgaaatgagatccccatcacagagattacaaggggaagtggctagagggcctcaggcagaatttttttttttttttttttttgagacacagtctcactctgttgcccaggctggagtgcagtggcgtgatctcagctcactgcaacctctgcctcctgggttcaagcaattctggtggccgctccacagacattacaaaacacgaggcaacactccaccctgaggtctgaagacccaaacacaagcattagtgccccatgagcaatcgaaagagaccttaagaaagtattttaaaaatgattaaaaacagaatatgcagcagaaaaaagatattaacatcatggctaagcagtttccgaattgagccagacagaacatctagaaatgcaaaatatatttgcttgaaattaaaaactcaaatgataaagcagaagacaggtcgctgagggaagtccccagagtgcagtgaagagaagagggccccatggcaccaggccgatggctgggtggcacttttaggtcccagagcactttccttctcatgctggtaggcagggtgccgactagccggggggccaataggggaaagagtattatccttcttttgcaagaaaacagaggctcagagattcagtgattcattcaagctcttccaacaagccttccaatgtcctgttcagagctctctcaaggggactgtgagagacacaagctaaaggagagtgcttgggctcaaaaaaccaaagccacctttttttgtatgagacagtgtctttgctctgtcacccaggccggatgtgcagtggcttgatcttagttcactgcaacctctacctcccgggttcaagtgattctcccacctcagcctcctgagtagcagggattacaggtgccccaccaacatgcctggctaatttttgtatttttagtagagacggggtttcaccatgttggccaggctggtctcgaactcctgacctcaagtgatctgcccgccttggcctttcaaactgctgggattacgggtgtgaccaccacgcccgggagcacggttctataggtggatgaaaattacaataggataaaacagcaaataaggaaaagcaggctgctagctcatgcagtgggcagcccctgcctggagtgaaatgagatccctatcacagagattacaaggggaagttggctagagggcctcaggcaggaactttttttttttttttttttgagacacagtctcactttgttacgcaggctggagtccagtggcgtgatctcagctcactgcaacctctgcctcctgggttcaagcaattctggtgcctcagcctcccgaagagttgggattacaggcacccaacaccatacctggccaatttttgtatttttagtgagagacgcaagtgtctctcacactagtgagacagggtttcaccatgttggccaggctggtctgtaactcttgacctcaagtgatctgcccgctcggcctcccaaagtgctgggattacaggcctgagtcactgtgcccagcctaggaagatcttaaaagggatttctgcataggttggggtggggagtggagttcactcagatcctactccaaggtagcttccaattaggggactataagatatgattttagtttctgctctactcccaaaggaaaaaaggtcaaagggtcagcagcaggtcttgaaacaactactccaagccagtgaggccccatctgtccccgggggtctcctgcttaccgggctacagtcacagttctggttgtgaccatggaggacaagggcagatgctgaatgcttcctccaaatcagtttgtcaaacaaattattaagtccagggatcagcttgaactctgcaatcattctgtgaacctgaatgggataggaaggaaaaagtattaagacaaatgtgcttgaaaaatctagcaaaacctcgtgctcagtacacacgataatgatattcaggacaagtatcagtactgtcagtaaggagggccagggtctgaagaaaacatccgtgtatcccctatgcccagcacacacaaacccactttctaactttgctcattaatgctcacaataatcctacaaggcataatgtccggtagttcctatcacagaagcatgagtttgggattcagagagtcctgcatatgattcaagagtcctttgggatgcaagagtcctgggtttgactcttagctttaccatgtgcaaactttgtaaccttaaacaaattccttaagatttgtctcctcgtattaacatcaaaatgttcctcatgctttgcactaggataaatttcagctgaaagtaagatacaattattaaaaaactctaagatctagaaaaatctctgcaaagaaaaaaaaatgatctaagagttggaaaagcctttctgaaggattataataaacctagaagctcaaaaagaagcttgttgacatcaaccacctaaacctttaaaaattctgtatggcaaaactcaagcaaagtcacaagccaaatatgacaaacagagaacatacattggcaattcatgccacaggcaaagaaattcctctataaggagtcctacaaatgtctctgatttttcactttttcagactgggaaagatgacaaagctttataagaccgtgttggtgacttgggcattgggtacattcacacgctgttggtgggagggcacactggtatgacctgcacagggaagagtgtttggcagtagctctaaaattgcaaatccataatccctttaaaccagcaattccactttaggaatttacactcagacagatccatataaacactaaatgatatatatttacaacactactcactatagcattatttgtaataccccaaaataaattatggtatgccactcaatgggatacaaggcaccagtaaaaaagaatcaaggtattttatatgtcgtgaactgaacaattgccgagagataatactgggaaagcaagtgtgctcatgctgtattactgattgtgtaaaaaaagaggaatacaattcgcctttgtaagcataaaaatgtctctagaaggatacactaataactggtaaaattagctgcttcatggaaccattagaatagaatgtcaaggatcagaggggagagaggcttcacttatactaatttatatcttttaaaacagaactgcaggaatgatttccctgttaaaatttgtttatataacataaggctattactagcccttctcggggctgttgtaaggatcgagtcagaaagcagatgtaaagctctgcacacagcaccagtgctcgcttattgctattttacaagggggagaagttcagcaagaccagcctgggtaaggtcagtgattgcaacggcacctaactcaggtgttcagatcttaagtctgcccctttctagcccactacaggtatgcatttatcttgggagaccagaagctgacaaagacatccctggcagcctccatttccatggacctcttccttcaacatattaggttgtgtaaaagtaattgcgatttttgccactgaaagtaatagaggtgactattctcttcctactagaaatcacagcctctggccagtgttaagactcataagcagcccagaatctgttagactgaggctgatgtaaaatgacacctgttctgccactcaggcctttactaaaacccagcctggatctaccttgccctgcttaactgggggtggggaggtacggctgacatctatggtgttcaccaagccatgtgccttcctgtctcactccaaagggccctaagccaggcccaggtcacacagctataaaatgttccaacaatggcccaaaaaaattcatccagtgcaattgcctcactgcacagactagaaacccaagcttaagagattaggggtgagtcacacagctgggaagagaggggccttctaaggcagacttggacctgaccctgggtctcctaagttcaggccagtgcttaggtttgaggtttctactacatcatttcccttttctcttaacaataccagcttctcggccgggcatggtggctcacgcctgttaatcccagcactttgggaggccaaggcgggcggatcacttgaggccaggagtttcagaccatcctggccaacatgatgaaaccctgtctctactaaaaatacaaaaattagctgggtgtggtggtgtgtgcctataaccccagctacttggagggctgaggcaagaggatcgcttgagctggggaggcagaggttgcagtgagccgaggtcatgtcactgcaccactccagcctgggtggcagagcaagactgtctcaaaaaaagaaaaaaaaaaaaaaaaaaaaaagaaagaaagaaaatagcagcttcttcatgtgtaaaatttgtaaaacaaattttacttgtagaatgcattattcctactctcaggtccagccccgtagcctgctctatagcaggatggtaggcaggtgggcgagatgaagtgccactctaccagaggaggcagcgggtacaggctcaggcatttatctctgcagtcagacagccctgggttcacaagatagctctgtgaccctgggcaacattctttgaacccaagtcccttgatagaaaaggcgatgggggacgatggagctgttgaaaaggctcagtgaggtactgtagaagctactcagggggcactaaaagaaacgactgctatatggatggttttcattagcaccagagggatgaaacttgacagcacatggggagcctttccagtcctgagatttcaatttggccaagattggtctgagaacttggcccaactgctcattaacgaggaggcctctttaaggaggaagccttctgtgaggcctggccaaggaaacccttccccttgctacccagtgtaggcaggatctgggaatccagatcctcacggtgcccggcacacagcagaaacccaggaaatgctgactgtgcaaatgagaacacgctagtgaaacagtggttttggggggccaggatttcaaggtcattagtggtcccttcccaaggaaccagcactgtaatcatacagtttaactcaagaccgcaacaactcatagcaacctggcaacaagaaggctcagggaacagagaactgctgtgagagggcagaaagaggagacagggcagcagagtttaaatcctggctctatccaggcctgtcccctgagcgcacagcccagtttatgccctggctttctcaagaatcgagtgtggggacacagagtcaccacctgttgtgtaacttactaaatacctgaaaattcaaacaactgtgaaagtgcctcgaaaaagtaatagcactcaatgcacagaagctgtccctacaattatttcacatataagcaactgcgaaagtgcctcaaaaaagtaatagcactcaatgcataaaagctgtccctaaaactattattttttattaaaaacatgttccgtattgaaggaagggacaccaatgctgtggctatcaccgtgggatctcatccagtgtcctggttttaaatacaaccatatgctgaggactcccaaagtgatacctccagccttgccatctccccaacaccaggtgtaggtaatcaatccaagtgtcaattctaacacacacctcaaatctaccttgtacaaaacacaactccccatcttcctccctaagcctgctcctccaccccttacctgctagtcttaaccacctcaatacctggcaaatccattctcctacttccttgggcgaaaaaccttgggagtcacccttaactcctctcctcactcttaagttcacatccaaaccatcagcaaatcctatctttcaaaacatatccagaatgcaaccacctcccaccagtcccaccatcaatgtgctggtcctagctgctatcatctcttggccctattatgagggcccctaatggtcgccctattcccttccttgctgtttccagtctttccaaaagcagtcagaggaatgacttctcacttcactcagagtaaaaaccaaagtctttaaaatggcctgtgacagcttgacatgacctggtccctgtgagccctcagccctcctctcctggctgtttgctccaggctgtcccgcgctgcctcactgttccagcaactatgcacactcctccccagggcactgccccctcccacctggtacactctttcattctcttctggacgttttcatcctcacttgtaaaatgggggtaactgcacctctgttgcccagacttgtgacagtccagtgtctgactcagaaagatgtggaaggactgctgagcctccagcctctcctgcccccatgcttggtttcctccctagaagggcgcggtctgcaggaaaaggctacttctcaatagtcttgaggagggccgcactgttccaagccctttttcctccactgtaggttatgggcccctcctcctccgtcttggaactacttcaaggctcagggaaccttgcacatctggagctccctgtacttgcccagttttcctaagcagacacagctctgggctctgtcccactgccctgagcccacatcaggttggcaactcctctagcatgtccacagggccaggcttgccagctttcaactctttagtcttcacctcacagaggcaactgcctgcttctgccctcagcaccaaccaagactgcctagaaacgctccatacagcaaggcacagtgaaaagactcccggttctggaatcagcctggtttccttataggtagaacagaaggagaaatacccctatgctttgccaggctaaagcgagagccattctaacagaaggcccagtggagcacctggcataccatgagcacccgggcagcacctgctccccgtgtcctgagacgctggagaggggcccacctggtttcgctgacgccccatcagcagcacgcagaggacatagagcacttccagtttgtacatgatctcatgcataatcttcattgactggggcagctgggttctggctgacgtgtgaggcaggccattctcctcagaagcccctggaggagggaacacaatggaggctgacacagccaccggagacaggattgagtcacagcttgtgaggaaacacgtttctgcccctcgaacctgctctgaacagacttgtagcatggccattcggctgggccatgagcccaaaacacagactctgaaagctgcaaaactccctccacaatcccaggagccaggtgagcgcagagactcggaaaaatggactctgcaatagttgtgcctcatcaactttaacataaagtaaaaatattcggacacagccaatacagtaacatgacccatccctccctgcttatgcccttctcctgccaccaaccagacccccaggaagtgcccaggcagatgtatgacagcaaattatggggaccgctcttcaagtcgcaaatggccctgcttacttggttcttctgctgagactccatgagggacactgctgaagcccaagagggattctttttgaagaattccccgttttttaaaagaagaaccatctaaatttttctaaggttcaactttctaaagcagactgggtatcacaactgatgctactgatgcagatgaacatattatctacaggcagattttcattttacccaatgtcattactgctaacatcaacagcagctaagtgatatttatgggacacttgatatgtgtcagacttgctggctttatgactttgggccagtcacctcctcactaggccttagactgctctgcagcagacagctagggttactgtgcagactgaatgggaacgtaagagaagcccagcatctgattcttaggaagcccccattcactcctagatcctttctttacttatttacagagtcttgctctgtcacccaggctggagtgcagtggcatgaccttggctcactgcaacttccgcttgctggtttcaagcaagtctcctgcctcagcctcccgagtagctgggactacaggcatgtgccaccacgcccagctaatttttctatttttagtagacatggggtttcaccatgttggccgggctggtcttgaactcctgacctcaagtgatctgcccgcctcagcctcccaaagtgctgggattacaggcgtgagccacggtgcccagcgtagatccctactattttaagagggcattggtcagagtcaggagaggctaggtgatcttagcagagtgacttcccttcagtttcctcattttaaaggtgaacagatgaatcagtaactgccaaggtcctctcaagttcctacaggaactgcttccctagaggccttttgcaaaggcctctatgtgttatagaggagtggttatcagatatattcaggtaaggctcatacagaaaacacagtgatactctttaaagtatcaagacagaagaccctaacttattccgactaggtgtggtggctcatgcctatgatcccaggactttgggaggccgaggcaggtggactgcttgagcctaggagtttgagaccagcctggacaatacagtgagacctcattgctataaaaaaatttaaaaaattagctgggcatggtggcatgcgcctgtagtcccagctactcaagagggagaggtggaaggatcgcttgagcctggaaggtgaaggttgcagtgaaccaacagagatcgtgccactgcactccagcctgggcgacagagctggactgtctcaaaaaaaaaaaaaaaagagagaatctaacttactctatcctacagacttggaactatctttccccgtcatgttaaaatcacaaccttggaagacgacaagctgctgaatgaagtgtgactgagacacagtgtgacacggtagttaagagcactgaccctgaagccagactactgggtttgaaccccattcactagccgggtggtcttcagtaaatcagtggacctctctgtgcttcagtatccatcctcctttgtaaaacagcaatactgacaaccatacctaccccttaatgttgtaaggagtagagggatatactgaaggtgcctggaacatagccccaagtaagcaacatacaattagaaactaaatagaagttaagttctcagaaaactgagtttttctgcgaatgcttgcttgttactttgtattctttttcatctccaagcttttaatgggaactaaacaggcaggaggcaaagacttaggaaaaatttactggagaaatttttaatttaagagattctatctactcatatttattctcctgtaccttgggcaaaaaactatagttactcaatttccatgttagcactccttggcccagcttccagaacagttaagtgtcagctaatctgtgaagtgaacctgaagaactatcacgcagaatcctgcctctgtcgtgcactgctgtgagaccttgcgtgcttggcatcctcggcacccagcccatggtgctctagggagtcctgcagggaaggatgtttatgcaagcagtgggcacagtgtggggcacacaagtcctactgagaaatgaacgtctgcgaagaaagagacagggcagcctgacccctctccaagtcaccaccaacttttggtgcctggcttgcgcaggcctgacaagactttctgtgataaatattttcaagaaacagtctccaaagcaatggccagagcttagcaacaaggtcagtcccaaggatgaggatgggaaaaccagctcacgaggcctgtgctcccctgagtctcttcagctctaccacaccgattggagcggtcaccactctctgtctgcactgcactgttttctgcggacatgcacactcacttttttttttttttaacagctttgaggtacaattcacataccatgcaattcacccatttagttaaccatggtatcgtgatttttaggacattcatagagttgtgcagccattaccacaatcaattttagaatatcttcatcaccccccaaaagcagccttgtactcactaccagtcacttcctatttcccaccaaactccttagctctaggcaaccatgaaactattttccatctctatgcaattgcctgttcaggacacttcatattaatgaactcatgcaatatgccatcttttgtgactgcttctttcacctagtacaatgttttcaaggtttatccatgttgtagcccctatcagcattcccttttattgctgaataatatccgctagtataaatatatcacattctggcttggtacagtggctcaggcctgtaattccggcactttggaagaccaagacgggaagatcatttgagtgcaggagtttgagaccagcttgggcaacacagcaagatcctgtctctttttattacaaaaaataaaaaaattagctgggcgtggtggtgtgcacctgtttccagctactcgggaggctgaggtagaaggatggctgagcctgggaggtcagggctgcaatgagctgtgatcacaccactgcactgtagcctaggtgacagagagagaccgtctcaaaaaaaaaaaaaaaaaaaaaaaaaaaaaattctgtttattcattaatcaggtgacagtcatttgcgttgtttccatattttggctgttatgaatatgctgtgatgaacatacctgaacaaatttttgtgtaacatatattttcatttctcttgggtatatacctgggagtaggatttctaggccctatgacataactgtatgttaaccctttgaggaactgctagactcttttctaaagtggctgcactattctacatgcccactaatagtgactgagggctctgatttctccatattcttgccaacccttattatccaccttttttgatgataaccattctagtgagtatgaagtactatatcattgtggggtttgttttttcctctatcatctagactacttaagtgcagtggcaggatcacagctcactgcagcattgaactctggacccaaacaatcctcccacctcagcctcccaagttgtcaggactatgggcacgtgccaccatgcctggctaaccgaaacaaaatttttttttgtagagatgaggtcttgctctgttgtttgagctggtcttgaacaatcctcctgccttggcctcccaaagtattgggattacaggtgccagccactgtgcctggcctcactgtggttttgatttgcatttccctgacggctaatgatggtgaacatttttcacgtgcttaataattatttatatatcttctttggagaaacatctattcagatcctttgtctatattttgaaatgggtttttttattattgttatgagagttctttatacattctagatacaaatcccttattagatatattatttgcaaagatgtcccaccctgccttacccacaaaaaacgttcttccattctgtgggttctcttttcactttcctcattgtgttttctgaagaacaaaaagttttaattttgatgaagtccaatttattatttatctggttgcttgtgcttcagatgtcattgtgtatgacagctaaattgttaaatccaaggtcatgaagctttatccttatgttttcttctaagggtttcacaggtttagctcttacatttaggtctttgacccttttaattttgtatatgacataaggcaggggatctaacttcattctttcgcatgtggacatcaaatggtcccaataccatttgttgaaaagactactactgtttccaccaatgaatggtcttggtacccactgaaaatcaattgatcataataagcatgagggtttatttctgaactctcaacaatattccattgatcaatatgtctatcctcaggccagcagcatagtgtctcgattgcagctttgtagtaagttttcaagtcaggatgtgagttgtcttaggttgttttttttttttgagacagagtcttgctgtcacccaggctggagtgcagtggcacaatcacaggttactgcagcctcaaactcctgggctcaagctaccctcccacctcagcctcttgagtagctgggactataggtgggtgtcacgaggcttgcctaatttttaaattttttatagagacaggggtctcactatgttacccaggctggcctcaaactcctgaggccaagtgatcttcctgcctcagcctcccaaagtgctgggattacaggcatgagtcactgtacccggcctagttcaagactgtttttgttaatccaagtctcctgcatttccacatgaactttaggatcagctactccatttgtgcaaagtagtcagctgagagttatgacagaaattgtgttgaatctgtaaggctgatctatagatcagaatgggactatcattatcttaacaatattaattttctgattcaaagacatgggatgtctttacatttatttagggtttaatttctttcaatgatgttttagaattctcagagtataagttttacacttaagttcctaagtattttatttttttgatcctattataaataaaattgttttcttaatttttggtttgttgattgctactctatagaaatactactcattttttaatattagccttgtattctgaacctttgttgaacctatttattagtttactggtttttatagtagattccttagatttttctacatataagatcatcccatctgtgaacagtttcactacttttctaatttgcatgcctttaatttctttttcttgcctaactgccctagccagaacctccaatacgatgctgaagagaagtggcaatggcactgccacttccagaaacgatcaggaactcgtcttgttcctgatcttagtggtagaagctttcaattttttgccattaggtatgtcagccatgggtttttgtagatgccctttaacaggctgaggaagttctctcctgagtttttgtttttaccatgaaagggtgttggattttgtcaaatgcttttttgctcctatggaaacgatcatgtggtttttgtcctttattctattaacacagtgtattacataaactgattttcaaatgttgaaccaaacttgcataaatccatttggtcatggtatacaatccttgtatgttgctatacttggtgtgctagtattttgttgaagatttttgcacctataatcataagagatactggtcttgtgatgtctttatctggttttggtatcatgataatatgacctcaaagagtaagttgggaactgttccttcctcttttattttctattagagtctggaaagtattggtgtgaattcttcttgaaacatttggtagaattaaccagtgaagccatgtgggccaggacttttctttgtgggcagtttttcattatttattcaatctcgttgttatacttcaggttttctatttcttcctgagttagctgcaatagtttgtgtcttttaacttgctcatttcatctaggttatttagtttattggcttatattgtttatagtattcccttagagtcctcttactttcttaaggttggttgtaacgtaccttctttcatttctaatttagtaatttgagcctttcttttttggtcagtgtggctaaaagtttgtcaactttgttgatctttttaaagattacctttaaaaaaatcacctttggttttacagattttctctactgtttttctattctctatctcaccagttttcactctaatcctattacttccttttccttttgagatgtttgttctttttccaatgacttaaggtagacgtttaggcaatttagatttatttaaaaatgtaggcatttatagctctaaagttccctctaagcacgctttagctgcatcccataagtttgatatatagtatcattttcatttgtctcaaaatatttccttttttttttttgatggaatctcactctgtcacccaggctgtagtgtgatctcggctcactgcaacctctgcctcgggggttcaagcaattttcctgcctggacctcctgaccttaagcgacccgcctcctcggcctcccaaagggctgggactacaggtgtgagccaccgcgcccggcctcaagacacttcctaattttgtttgtgatctcctgtttgacccactggttatttagaagtatactgcttaatttgcatgtatttattaatttcccaagtttgttatttatttctaactcaccccactgggatttgaggacatacttttgtacagttttaatccttttaaatttgctgaacttttttttaacagcctagcatatggtctgtcctggagaatgttcatgtgcacttgagaagaacgtgcattctgtagtagttgggtggagggttctacagttctctgttagtccttgttggtatacagtgttatttaagtcttctgtttccctgttgatcttctgcttagttttatccattattaaaagtagtatgttaaggtctccagctgttgtttttgaactactgctctcttccaatctgttagtttttgcttcatgtattttttgggggctgtttttggatgcatacatgtttataactgttgtatcttcttgatggtttcaccctgttattatcaaatatccctattttgctctgataacagtttttgttttaaagtctctccagcttttttggctgggtggtggtggctcatgcctgtaatcccagcactttgagaggccaaggcaggcagatcacctgaggccatctgagaccaacctggccaacatgctgaaaccccatctctactaaaaacacacacaaaaatgagctgggcgtgggctccccgcctgtaatcccaactacttgggaggctgaggcatcagaattgcttgaacccgggaggtggaggttgcagtgagctgatcgtgccactgcactccagcctgggtgacagagtgagactctgtccctccaactttttaaaagtacagcctctccagctttctcgtggatgctgcctgcatgatacatctttttctgtcctttactttcaacctattttatctctgaattgaaagtgtgttttctataggctgcatataactggatcttgttttctgatccaatataacaatctgtcttttgaatgaattgttaaatctattcacatttaatgttactattgataaggctggactgacttctgccatttaactttttgttttctgtatgtcttgtgtgtttttttgttcctctatatctcctttagtgtttcttttgattaatattttctagtataacattatatctccttcaattatttctttactatatttcccaagttactttctttttttttttttttttttttttttgagacagagtctcgctctgtcacccaggctggagtgcagtggcgcgatctcggttcactgcaagctccgcctcctgggttcacgccattctcctgcctcagcctccccagcagctgggactacaggcgcccgccaccacgcccagctaatttttttgtatttttagtagagacggggtttcaccacgttagccagggtggtctcgatctcctgacctcgtgatccgcccacctcagactcccaaagtgctgggattacaggcgtgagccaccgcgcccagccccaagttactttcttagaagttgctggctggcgcggtggctcatacccgtaatcccagcactttgggaggccaaggtgggtggaccacctgaggtcaggagatcgagaccagcctgactaacatggagaaaccccgtctctactaaaaatacaaaattagctgggcatggtggcacatgcctgtaatcccagctactagagaggctgaggtaggggaatcacttgaacccaggaggcggaggttgcggggagccaagatggtaccactgcacttcagcctgagtaacaagagcgaaactccatatcaaaaaaaaaaaaaaaaaaagaagttgcttaccacatacatcttaatcttttccagattttttttaaaaattagaaataaatatggaatgcatcaggaatttgcatgtcatccttgcacaggggccatgctaatctctgtactgttccaattttggaatatgtgttgctgaagcaagcattttcggatttattctaacttagagctccattccatcttcattctttttgtgctgtaattgtgcatattgtatctatgtatgttaaaagcccaacaatacttgttctaattgttactttaaataattttatgttagagaaactgagaaaaggaatgaagagcaagtatacatttatggagtttttatatttaccctcttattaccattttggttctcctcaccgattcctagggattcaagttgcaatttggtgtcatgatactccattacaactttggtaccacccgttttctttgtacagttattgcaaaatatgtttccatatgttataggttcaacaatataattagatggtttgtgtaagttttttaactgaagaaaaggagaagaaatatgcatttacacaatctcttacaattacagaattacctttacttaaggtgctctttgtttttcatgtggagtcaaattactgtctgaagtcacctgctttcaacctgaagaacttcctttggtatttctcataagtcggtatgctgcttaatttccagatgtttgtctgttactaatgagttctttcagtttttcttttctaagaatgtttttatttcaacttcatctttgaaacatagttttgtaaaatacaagattcttggttgactgttttctttcagcattctgaatatgtcaccctactgccttctgccttccattattcctgatgagcagtcagccactaatcttattggaatatccttgggcatgatgagccatttttctcttactactttcaagattttcttatctttcaggattttttttttttctttttggaggcagggtctcgctctgtcacccaggctgtgattgcagctcactacagcctcatcctcctgggttgaggtgattgtcccatctcagtctcctgagtagctgggattacaggtgtgcactactacccctggttaactttttttttttttttttttttttttcaaagagatggggttttgccacattccccaggctggtcttgaactcctgagctcaagcaatccacccttcttggcttcctaaagtgcagggattacaggtgtgcgccaacatgccaggcctcagcgtttttattaccatgtgtctgcatgtggatctgagtattccgacttggattctttgggcttcttgaatgtgtgcattaatgatttacattacatttgggagattttcagcattatttctttgataatttttctgttactttatctccttctggtactcccattatgcatatcttggtgtgcttaatagtgccccacattattttaaggccctgttttctttattctttcttccctctgttctttagaatgtttaatctctatcaacctattttgctgagtctttcttctgccagttcatatctactgctgagtctttctagtgattttttcatcttgattattatactacttaaaaaaaagttttttttgagacaaagtctcactttgtcacccaggcgcaactgcagtggcaccatctcagcacactgcaacctctgccccgggttcaatcgattctcatgcctcagcaatccaagtagctgggattccaggtgtgcaccaccatggccatctagcttttgtatttttaatagagatggggtttcgccatgttggcctggctgatgtcaaactcctggcctcaagtgctccgcccacctcagcctcccaaagtgctgggattacaggtgtgcaccaccatggccatctaacctttatatttttaatagagatggggttttgccatgttggcctggccaatcttgaactcctggcctcaaatgctctgcccgcctcagcctcccaaagtgctgggattacaggtgtgagccaccacacctggcctgattattatactactcttcaattctagaacttccactgggctcttttcaaatacttcctatctttttattgttattctctatttaacgacacattatcaaatagtcctttacttcttcaagcatagttttagttctttgatcttttttttttttttttttttttgagacagagtctcgcactgtcgcccaggctgaaatgcagtggcaggatctcggctcactgcaacctctgcctcccaggttctcgccattctcctgcctcaggcctccccagtagctgggactacaggcgcctgccaccacgcccagctaattttttgtatttttagtagagacggggtttcaccgtcttagccaggatagtctcgatctcctgacctcgtgatccgcccgcctcagcctcccaaagtgctgggattacaggtgtgagccaacgcgcccagccctttgatcatatttttaatggctgctgttaaatctggtatctggaccctttcacaggaaatttctgttgcctgctttttcttgtgtataggttacacttcctgttttttgtgtgtatgtctcaatttttgttaaaaactggacattttaggctgggtgtggtagctcacgcctgtaatcctagcactttgggaggccaaggtgggtggattgcctgagctcaggagttcaataccagcaactaggtaaaatcctttctctactaaaatacaaaaaattagccgggtgtggtggcatgcacctgtaaccccagctactcgggaggctgagagagaactgcttgaacatgggagacagaggttgcagtgagccgagattgtgccactgccctccaacctgggcgacaagagactccatctcaaaaaaggacattttaagtaatatactgtagcaactctggatactgattccccctccttcagggtttgttgttgttatttgcttatttattagtttagtgacttggttagactattttcgtaaagtctccttccccaaagactggtgaagattttcatgttgtgcctcagagagtgcaaccttgggcatgtacagagtctccctgggatgacattgagccaggctgtctttgactagctctttccatgatctctctgttaagctttctacctcttctggtatcacatccagctgttaggctctactaactgctgactgaattctcgactgtttttgataatgccctggagtatacactgctccaaagtctaattcaattaaattcaggaaggggtaatttttgaaattgagctttgttctgaccttgggagagttcttctcagctgtctccttccctggttctctggtgaactagctggcctgtagatcaccctgttcttaattaagaagagggtacctggccaggcacagtggctcatgcctataaacctggcactctgggaggccaaggagggtggatcacttgaggccaggagtttgagaccagcctgaccaacatggcaaaacccgtctctattcaaaaaagagaaaatataaaaaataaaagagtaaaggccgggcgcggtggctcacgcctgtaatcccagcactttgggaggccgaggcgggtggatcatgaggtcaggagatcgagaccatcctggctaacaaggtgaaaccccgtctctactaaaaatacaaaaaattagccgggcgcggtggcgggcgcctgtagtcccagctactcgggaggctgaggcaggagaatggcgtgaacccgggaagcggagcttgcagtgagccgagattgcgccactgcagtccgcagtccgacctgggcgacagagcgagactccgtctcaaaaaaaaaaaaaaaaaaaaaaaaaaagagtaaaaaaaaagaagaggtacctctttttatttgcttaccatcaaaatctcctcaggcatgaacttccctggactctgttcttattaactgcctctctctgtgggcaaattctcagagcagggtcagtagcctctagtcttccgggcttgcctctcccagtgtaaaacctctgtacatgagcaagctagggcaaaggtgatcagagccatagaattcttggcctcaagtatgtgggatagagcttccacaccgtgagtacagtatggagctgggtggaggaaggaagcctctgacctctttgccatactcaccgagaacttagtctcttcaatttggagctggagggaagaagaaaagctgatggccccccactcccaatgagaaacctattccttgtttgggagctgagaattcctgggtttgtatattctgaacctgctggccagagtcaaatgctttaaggctgggcacctaaccaaagatgggccagagttctttaccaggaagctggagctgagactgggagtcttcttatttaataggcagtcttctgcctagtcccatcaaggggaccaggaaaaggtagggtacagtgagagagaagactaagaaacactgtagaaagaaaaagagacgaggagagaagtttctaggttcctaagaatgctctggttactggttcttgttagtccctgagacacagctgtctcaggtctgcaacaaagcccttctccctgaaatcaggtccactttggggagttcaatgaagtttctgtaacaagctgtcaaaagagtcttaatagtcatggtctagaattgccttgaggacaattctactctgagcaaatctcaaattaatccttcttggaaagaagagcaagaatggtcccaggcgcccaaggaaaagctcccgatcactcaggggacccatccttccataccttgattgtgctctgactcctcattggccactcgcatcagggcatctagcaccaaagcattgtctagccatgtgtaccactcttccaactcctgaaggaagctggctgtgcccgttgactctgacacctttcgagtcgccagtttgcaaagccgctcaacaaagccaggaatgctgagaagggccgctgccagggaaagaacaagcgaggaaattttcaaaatagagaccagcaaaactacccctaaagccctaacaaacaatctgcatgataggaataattcttactctgatagtagctaaagctactcttttaaaatgaatgtcaaaccaaggtaaatagtaattatgttacaggcataagctcagtttttagcaggtacagggaaacaggctttttatctactgggaatataaattagaataatctttatgccttaaatgtgtgtgtctttgagccaagaggtcaatttctgggaatttaccataacgaaataaccagtcatattacacgagaatatctgtataaggaggttcactgatgtggtttctgtaacagcaaaaaggtgaaggtaactaaatgttcatcaacagctgattaattaaatacaatgacacatttatacaatggaatactgcatagacactaagaatgatgacacatacatctttatatagtgactcaaaacagctgtttacttgttagagagtaaattattaaacaatatgaatttaattttcttcaaaaatttaaatatttgcttcttcaaaatacacaaggaatgaaagcatatataccaaggaatttactgtggctgttcctaagcaggagagaatacaaacaattctcttaaaattactcatctatagtttctaattttcctgtaacatttactagcaggatgaaagataaacatttttttaaggtaaagaaaaaaactgaataatcacccaatttttctttccaccaatctcattttattcacaatgagtgaggtggaaattctgatcggcatattagaacatcataaactttggaggcagggagatccagattcaaatcctgactccatcatttaaccttctttaaaatgagactaatgcctgatcatgtttgcctgtatatgcattaagtctccctggaaggacagaaaagaagccaagagcagtggctgccacagtaaacagccataagatggaaacagccaaaatgtccgtcaagtggaaaaggggatttaggtcactgagagtaacagtggaactgaaacttttcaataaatacctttttgaatccgcagattttttggaaccatgtgaatgttacacctaattaaaaattaataaataactagatatttcaggatatcaagggattactattaatttttgatacagtggcagttacgtttcttaaaagtcgttatcatgtagaaacactgaaatatatgcaggtgaaattatacgatgtctggggtttacttcaaaataacccaaggtgaagtagggtatagtgaatgggagtagagataaagtaagacaagctggccaggcacggtggctcatgcctgtaatcctagcactttgggaggccaaggtgggtggatcacttgaagctaggagtttaagaccagcctggtcaacatggcgaactccatctctaccaataatacaaaaattagccaggcgtggtatcgtgcgcctgtagtcccagctactcaggaggctgaggcatgagaattgcttgaacctgggatgcagaggttgcagtgagctgagactgcaccactgtactccagcctgggcaagagtgatactctgtctcaacgcgtgcgcacacaaacacacacacacacacacacccctcccataattagtgagtggctataagatgatgtttgaccttagttataaaataaaactacattgaggttcctcaaaaagttggccaggcacggtggctcacgcctgtaatcccagcactttgggaggccgaggcgggtggatcacaaggtcaggagatcgagaccatcctggctaacacggtgaaaccccatctctactaagaagtacaaaaaattagctgggcgcggtggcaggcgcctgtagtcccagctacttgggaggctaaggcaggagaatggcgtgaacccaggaggcagagcttgcagtgagcggagatcgcgccactgcactccggcctgggcgaaagagcgagactctgtctcaaaaaaaaaaaaaaaaaaaaaaagtcaaacataaaattaccatatgacccagcaatttcactcctacatatatacccaaaagaattgaaaacaggtgcacacacaaatatgtgtacacacatgttcatagcagcactattcccaacagccaaaagatgaaaatatcccaaatgtccattaactgaagggataaacaaactgtggtatctacatgatgagtattattcagccatataaaggaatgaagtactgacatgctacaacattaatgaaccacaaaaacattatgccaagtgaaagaaaccagattcagaaggccacatgctatatgattccatttacagttatgcactgcattaacgctgttgcggtcaacaacgaccacacagaagacggtggtgccatcagattataatactgtatttttactataccttttttctatgtttagatacacaaatacttaccattatggtacaactgcctactgtatttagtacagaaacatgctgtacaggtttgcagcctaagtgtatcatgggctataccagctaggtttgtgcaagtacactctatgacattcacacaatgacaaaatcacctcactgcatttctcagaaggatagagactgctaagtgacaacatgactgtatatgaagtaatctgaataggtaaatccacagagaaaaaagcagaatggtggttgccagcagttggggagaaggggtaatgggaagaagctgcttaatgtgtacggcgtttccttttggggtgatgaaaacgtgcaactagatagaggtggtagctgcacaacactgtaaatgtactaaatgccgctgagttgttcactttaagacggctaattttatgttacgtgacttccatctccataaaataattacacagaaatagatttttgtttgagacaccatttttttttttaacatatcagcttggcaaatataaaaaagtttgataatgctctgtactgggaaaggctacagacaacacggtggggaagatgaacaagtaatttctttggagggttaatttgtcaacacttaccaatttccattaatgggggactaattaaattacagtatgcctgtataatagaatattatataattacaaaaaggaatcatataattctatatatactagagtgtaatttttggcaagataagtttaataaaaagagagcagcacttattttatattacctatttacattaccatctgtacaaacaggagtcaatctctctctgtccctccctccttcccccgtcccatgattgggcatgtatagaatatttttcgaaggacgtttaagaaactggtaaaaagttaccacagggaggggaacaaactctctgctgtactttttgtatcatttaaaaaaaattttaggtgtgtattattttttctaaaaacaaatcagtaggcggggcatggtggcccatgcctgtaatcccagcactttgggaggccgaggtgggtggatcacctgagtttgggagttcaagaccagcctggccaatatggcaaaaccgatgtctactaaaaatacaaaaaaattagtcgggcctggtggcgcatgcctgtagtcccagctacttcgcagactgaggcacgagaatcgcttgaaccagaaagtggtggttgcagtaagccaagattgtgccactacactccagcctgggcaacatagccagactgtgtctcaaaataaaacaaagcaaaaaaaacaaaaaagaaataaaaagaatttgtattctacatgaaaatcttcacatagctggatttttactcttatacttctgttctcagcaaaaatagctcctgctgcttgacctgctcctctcaggacagcatgtaggagctagtcttccccattcctgcacactcaacacactcctccagatgggaagtgcccggtactcagggttctaagtctgacttcccacctgagattcttgagctgttgtgagtcactcacctcttgaaaagctaataaaagctaagaccttctccccagaaaaaaattcactggaccaatcatacctagcaactcatacacaatctcatgggctgacatcccagcatatccagtccttgtaattctcacagctttatcagtagctaccacacctggctggttaatgttaaactgacaactaaatcactcacaacccctgagaatttctgcagaagcaggcctcttctctcttctcactgttgaaacatcagtattccccccatactcctgtagtttcccctcctgctttccagcttcatgtgctgcataattcagcccctctcagctaagtgtcacttataaattgacaattatctagcctatagcttcatttacatctctgctaagaatcttgaaagacgttactttcccccagaaggaaaccagctgttctcttctaaatcgacagaagaacaactggtagttctgagaatctcaaaaaggactcaaaaaataattatttattttaaaatgaatctcaaaaaataatgacttacgctatcttcctggggctcagataatttacattagataattacatgtaaattatctgagccccaggaagatagtgtaaatcattatttttgctagacaagaaaatgacctcacagccacagtttattaaaaacgaaacgaaaactttttggcaacatcctacatatttcagctttccatacagttatggactgtgtccccaccccccgcgcccccacaaattcatacgttgaagctctagccctaaatatgactgcgttttgaaacaggccctttagggaatgcggtggtgtgatggttaattttagctgtcaacttgactggactatgggatgcctacatggctggcacagcactgtttctgggtgtgtctgtgaaggtgattccagaagagattggtgtatgagtgtgtgaactaagggaaaatctgccctcaatgtgggcaggcaccatccaattggtgggggagcagtgggaggcgatggaggaaaacaaaaagggattctcccccttctggagtgggaagtttttctcctactgctcttggatatcagactccaggatctttggcttttggtctctgagacttgcaccagcagtttctggggtcctccagccggggagctacaccattagctttcctggttctaagttttccggacttggactgagccatgctaatggcttctcaggttctccagcttgcagacggcttatcttttattttatttatttatttttggagacggagtttcactcgttgcccaggctggagtgcaatggcacaatctcagctcactgcaacctctgcctcctgggttcaagcaattctcctgcttcagcctcccaggttgttgggattacaggcgtgtcaccatgcccagctaatttttgtcgcagatggcttatcatgggactcctccgcctgtgatcgtgtgagccaattcccctaacaaatcccacctcataaatcctactgcttctgtctctctggagactgctgcctaatacagggaagtaattaaggttaaatgaggttacaaagtgtggggccctaaaccgagaggactggtgtccttctaagaagaggaagagacaccagagatctccgtctctcctcaatgacagagaggaaaattcatatgtggatacaataaaaaggtggccttctacaagccaggaagaaaggcctcaaccaggaaccaatcctgacagcaccttgatcttggacttctagcctccagaactgtgagaaaaataaatgtctgttagttaagccacctagtctacggtaccttgttatggcagctcaagctgactgatacacacacctgagataaaggcattcactactggagcgcaattcaagaatgataacattcagaggactaagactttcctcatccactcgtgatttaattatgtccaccagcttggccttcccagggcatttgaatggagaaaatcgtgcgggtaagggaatggagtaggaattatggtcagggttgggaagggtcagatcctgcacaacctcatgtgtggaactacaacttttaggctttatcccaaaagctacaagcagaatcacacatagactgtctactaggctagtcacacagatatgaaagtgaatctagattattttatagagactttaagaaaaaactcccaaataaaaaaacaaaaacaaaaactgggctttccgttctcagttaatcaaaaaagcccagctgaccagaacagttcattcctcaagaataatgggtaatgctggttttacttaagtcagtttacaaataggcatctgaaagcaatcaatactaacaggatcaaaatcatctgccagaatagattccttaaatgggaaactaaaagatgaaagttacttagtgcctcggcatacacaggcatccaatacagaacctttctagccctcagtttcctcacatgtgcaatggggatactaatctctattccacagggcacttgaaggattaaataaaatcacttctaggtaaagcagttacccagcgtttgccacataccaggagcttagcaaatactaccttttgtcaatgtatatggaggtgtgtacaccagctctgaggtataatttagttataatgaaagtcactttttttaaaattatactttaagttctagggtacatgtgcacaacgtgcaggtttgttacatatgtatatatgtgccatgttggaaagtcacatattttttaaaaatgtaaatttcctaaaatgagaactcccccaaaatcataaaggagtgggaagaaaaccgtacacagaccaaggaagaccttgtatctagtgacacaggaggaaaagcaaatctagagagagaataaactggggttggagtccacaaacttctacctttacatatgactacaacatgtaaaattatattccctaataacctacaaagtatagttatgatcacctcatgttcctaactaaaactagacaataacagagtgaatggcaggttcatattcagcctcaggagaggaggctgctctgaagcacttgataactctgcagagccagcctggggaatgcacacaactggactttagaaacaaagaactgttttcagagcatgattagggctacctctgcatggtcatggttttctactgctgctttttaatgatacatttgtataattttaccttgtttatttggtgtaccataaggtacacagtgataggtttttgtattaacaatatttccagcctgttaacattgaaaaactagcttttaagacacaagtttcagttcaaatatgaattatctacactcttatgaccaaaatacatctatgccagtttctccaaaatctgtgcaggcaacaacattttagatagaacacagttcttttgctactgaacagaaataggtgggctagattggttagaatagtgttttgtttttaagtaatatatttacacggttctaaaatcaaacaatatatgaaagtatacagtaaggagtcccactcccactgctactaccttcccttaccagctacttcctattaataaccactttatgtttcttgtgtaccctttgtttctttaggcataccatatatgtgggcaaacgtatggtcttattctccccctgacttaatacaaaaactataccatatacacactgttctgtattttcctctttatcattaatatatcttggagatttttctatagcagtacatagagatcttcattttttcaaagctacacaattttccattatataaatattgaatacactaagcagtccagtgttaatgaacatctgggtttctagtcttttgttattacaaataatgttgcaatgaataatttttttttttttttttgagacggagtctaattatgtcgcccaggctgaagtgcagtggtgcaatctgggctcacagcaacctctgcctcctgggttcaagcaattatcctgcctcagccttctgagtaactgggactacaggcgtgcaccaccacacccagctaatttttgtatttttagtagagatggggtttcgccatgttggccaggctggtctcaaactctgaacctcaagtgatcctcctgcctcggcctcccaaagtgctgggattacaggcgttaagccaccgtgcctggcctcagtgaataatcttgtacagtagtcctcccttagtcaagaccctcacagtggatacctgaaatggcagatagcaccaaaccctatatatactatgttttttcttatatacacacataactatgataaagcttaatttataaattaggtacactaagagattaacaataactaatgataaaatagaacaattgtaacaagatgctgtaataagagttatacgaatgtggtctctctctggaatttttcagttaatattttcggattgcagttgaccacggataactgaaaccacagaaagtgaaactgcagacaagaggagattagtgtctatacatcattatctataaaatgaaggcccaggagagacttagtagatcaaaaagtatatgcatttgtaattctgataaaaagtagttcttaactttttttgtggttctgagcccattaacaaatctaatgaaaggtatggaactcagttcccaaaataatgaacagatacacaaaatttacatactaggagccttcacatggatccatctctagagatatttaaaaggggtgctaggtgtggtggctcacacctgtaattctagcacttcgggaagatgaggtgggtggatcacttgagaccaggaagtcaagaccagcctgggcaacatggcgaaaccccatctctacaaaaaatacaaaaattagcccggtgtggtggcacctgcctatagttccagctactcaggtggctgaggtgggaggatcacctgagcctggggaggtcaaggctgcagtgagccacgattgtgccactgcactcctgcctgggtgacatagtgacgatcccatctcaaaaaaggaaaaaaaaaaaaaaagaaaagaaaagaaaaagaaaaaaaactagatgatttagtaagggcctcagagctataatctcaaaattctgagaacttggagactttaccttgattgatttcagctgcagaaggccccaaactcaagctcttcttctgttgagcatttttggcaagaagcgtgtgcttgtcatcattccctgtatccatctctgaaatggtgacagccagaatccggcagaaattagcgagctgctgctgatcgaaattggatactaaggaactcagattggggacttcatctagtcggatcatttcctacagaagacaaaaatgaaacaatccccatgctcaattcactcaagagattggatgtgcctctctttcgcatccccttacatacggggcttagtggctagatcacttaggttcctatcccagctctgtaacttgcagctctgaaactttggttaagttacaaaaacctttcgagtctttgcttgtttatctgtaaaacggaactaatctacctcacaggattagtctgaggactaaatttaccttttgagcaccactgttttcaattgttcttgtggtatattttgcctatttaaaaaaaaaggaaatgcctaccactcaagttttggaaatcataaattaccattcttgctacagatttgcttttttaaaaaataaaatacttcaaatatagctaaaggcctctgtgtatcccccatccagtcgcatttttttctctccctgcagacgtaaacattattttgaactctgtgtttattattcccgtgcatgtttttatacttacaaatatttccattaaaatacatgttactgctctgcatgcacagtgtgaatgataccatactataccttacttttcatccaacattttgaagtttatctacactgatacaagcagctgattcaatcacttcccgccgttttaccccacagtttaatcatctctctcttttaagagacagggtctcactctgttgctcaagctgcggagcagtagtgtcatcatagcttactgcagactcaaactcctaggcccaagcaatcctcctacctcagcttcccaagtagctaggactacaggtgcgtgtcattacacctggctacttttttaatatttttttttttgagatggtatctcattgtcgcccaggctggagtgcagtggcgcaatcttgactcactgcaaactccacctcctgggttcaagtgattctcctgcctcagcctcccaagtagtggggattacaggcgcccgccaccacgcctggctaatttttgtattttttagtagagatggggtttcaccatgttggccaggctggtcttgaactcctgacctcagatgatccatccaccttggcctcccaaagtgctgggattacaagcgtgagctaccacgcctggccaatactttatttttatggagacagggtctcactattgttgcccaggctggaactcctggactcaagcaatcctcccaccttggcctcctaaactgctgggattacatgtatgagccactgtgcctgaccctttcttcttttaatacatatttaggtaaactacagtttttcactattaaacaatgttgcaatgaacattcttacaggtactctctgtgtacacatgtatgtgaccatttatccagagtgagagcaagaattcttgtctttttcttgactttaccagaaataattccaaaacattaaaattaagttcaatatttgctgtaaattttaatatcctataagttaaattttaataaataccctatatatagtttataagttttccttctattgctagcttttattaagaatgataattttatggaatgccttgtgctatttggttctattctcactcattactccttaaaatctgtaaatggcatgtactacatcaacttttctcattttgaaccatccccgtgctactcagataacacctgctatccttcatcccactaatttacttccactggattgggtgtttctctttcactgcacagatcacatgaacttttaataatctgttcctgcatctatttcccaaataatctgaccatactttgatgaaggcatatatcctaccctttctcctgagactcaatgcacaggacctggtagcaagggtatcagtgaatgtgcccaaaacgagtgcatgattcctagaagctctcatgaatcccatactcgcctctatttctagtaatggaggacaggaatttgctgtgcagggggcattggggaacaactgcttccacttttccttttccctagtacaaaacaaatgtaagctactactattattggcaactgtaacttgtagctcaccagttcctctagccctgtctaactcagtatatggttcccaaaacaggtcccaccacccccagcccacttcttatggttttttgttttgtcttaaattttaagatttttttttttaaggcggagtctcactgtgatgcccaggccagagcgcaatggcacaatctctgctcactgcaacctctgcctcctgggttcaagcaatttttctgtcccagcctcccaagtagctgggactacaggcatgcaccaccatgctgggctaatttttatatttttagtagagacagggtttcaccctgttggccaggctggtctcctgacctcaagtgatctgcccacctcggcctcacaaagtgctgggattacaggcatgagagccactgtggctggccaagaatttacttcttatgttttaatttttgatatgtacaatacgtattatgcagcacaacaaaatgactagctgtgtgtgcctttcctattgcatctctctgcctctgggaaccaccatcattaattattattgccttgccatttaaaaactagttttatcaacaaataatttgcttttttgagctttatgaaaatgatatactacctacagtgttctgcaactggcttctaccactcgattatttcaattactcagctatgttgttgcctatggcaacagttcattcatttctactatataatattccattgtgtgaagaaagtacattcatcccttctcctattcatggatcagagacttggtttcagttttttgttctgaaacaacgaagctacaaatgttcttatgtgtttcttgatgcacaggtggagaagtttttgctggggcagtggcttctaaactttttagctatcaccaagaacgaccaccagtaaacatacatattggaatgtatatagaaatgtcaaacaaaaacttattcaaaaaatacccttacacaatacagtttgatcttttctacttggctggtagacccgatggactgactttacaaccttctgggtttcaatcctaagaatcactgttctaggactgagcttccccacaagtgtgtccaggcacaggttataggtaacccatggcaaaatactgatgcctcagccctcagggtaaagcttccctaggtgctggggcacaagatatgtgcctgttcaactacaaaacaaaaaaaaagaggatattctgctgataaacatttatcagtagtatacaagtgtttccactgatacacacactcaccaacatttgcccactctctccctcactatggtattgatttgcatttccttgattgccaatcaagttaaacatcttctcttttatgtttatggaccatttctttcttgtctgtgaaatgcttgttcataacattgcccatttgtctactgggctatttctctttttcatgctgatttgtaagaattctgtttttttttttttttttgagagggagtcttgctctgttgcccaggctggagtgcagtgacataatcttggctcactgcaacctctgcctcccgggttcaagcaattctcatgccttagcctcccaagtagctgggactacaggtgtgcaccaccatgcctggctaatttttgtattttttagtacaaaatgagactgggttttgccatgatggccaggctgttctcaaactcctgacctcaagagatctgcctgcctcagcctcccaaagtgttggaattacaggcatgagccaccgtgcctggcctgtaagaattattgataaattctgaatacaacaaatcctttgttggttacctgaattcaaatgtcttttcccagtttatggtgtttccactttctttatggtatctatccccctttcaaactgcaccaagatacccataatgtttggtggaacacctcgccattttggggtacacaaaaaggaatgagagggagtgagaggcaagtgggaaaagttgtgaaggagcacttctagactcctatgctgagactgctaaggagtctggagtttccactctggaggtcccctttcacacactggctggaacacacaattactggaataacaacaaagcctttttatcaaagggcacaaagggtctgtctggggcctgcacacatctccaatgtgttcctacagacaataggccacttgtgctgggcaatgacaagcaaggcctggggaaagcacagcaagaagaaatgaacgctgggttcaccacagtgcacatgaacatccacctccctgcaacagcaacctctaggaggctgctcaacaggaagagaaagaaatctgccaaccagcaaccaacatggaggctcaggacagattaggactggggaggtgagctccaggtcctaacaagcattacaccaaaaatgtaacacagtaagtctctaacagagatctatgaatgtatttttgggtatctgtgaattcttgaaatttttaatttagttttcatttcgatcatagctgtttttttttttttttaaagttatgggtcatccgaatattaaccttatgaccaagtggcaggatttcagagctcccatttgtctcctactgcgctggtgccaattaaccaactttaattgttgaagactaatgagaaaaaatagaggcggacttcataagtgaaagccaaacattactaccaaggagaacatatcctaatgaatgaaggcttcacaccagttcagatagcggtaaagtggtaagagaatggagtcactgcatagcatacaatagcacatacatgctacaaagaacttgccccaacggtgatgagtgaggggcaatttgatttcagcaaagtaacatgaggcatcaccctacattcacagagtcaatctgaagttctgagttttagaattagtttgatttcaatgtatgtctgtttaggttttacagtcatttaagaaccactagtataaggggtaatcaagttttatacttgaatacatctgagtaacaagacataatttaacactttcttttaaaaaagctctgtatattattcagttttgagaatccaatggtctgagacacccttccccatctggtcagctagaggacacagctcacctttttaacacccaaaatatcttcaatgagggttgctgtttgtaagaatgtcttcttacttgtcatcaatgtaaacaggaagatcacaaagtcattcttttctgccaaacgctttgtaactccctctgtctgtcacaagaagaaaaggcagaataggttgtaagtacaaaataaattatgaaagtacaaggcatcctttacagacactgaaaagcagtttcacctctgaaaactggcatgagtcaacaaaacaggaatggcatggcttaactgtgggaaacgctcgttaactccccagctatggaagaaaaaagtctcctgacgtgcaggctacacaagtgggaactcacttgtgagaacataacacaatgagatggtatttcctaaaataacttatctcagagttctgaaggccattcttaaatctgaaatcaaacagtgccgaagcatggacttaagagtcagacctaagttctaattccagctgtgtgatcctgagcaaatcacttctcacctttggaactccatttttttcatcagtaaaatgatcatcttaaaagtctttgaggccaggcgtggtggctcacacctgtaaccccagcactttgggaggccaaggtgggcagatcacttgaggccaggagttcgagaccagcctggccaacgtgccaaaaccctgtctactgaaaatataaatattagctgggtgtggtggtgcatgcctgtagtcctagctactcaggaggctgaggtaaaaggatcatttgagcccagaaggtggaggctgcagtgagcctagactgtgcaaatgcactctagccttggcaacagagggagaccctaactcaaaaaaaaaaacaaaacaaaaaaaccaacaacaacaaaaaaacaaaacccccaaggggtatgaaggaagttaaggaaactagctggtaaaagaccttaaaacttaggttcaagagtttggatttaaaactgcagtattgtcaagtgcagtggctcacacctgtaatcccagctaccccggaggctgaggtgagaggaccgcttgaggccaggagtgtgaggccgcagtgagctacaatctgtctcaccactgcattccagcatggggacagagtgaaaccctatctctaaaaagaaagaaactgcagtactgctatagcttacacacacacacacacacacacacacacacacacacatatatatcccacccctactgccttaaggcaactagagcttagtgactttaatatttcttttttttagcctctaagctgaaaaaattccaaggtttactgcgataaacttgacttctccttaaaaagtataatcaagagtgcagacacacacagtttggtaaatgggaaccccaagctaggaggcatttcagaatcagtgaaatgagatatgttgcaacaaatttaattttctttcttttaattttagagacagggtctcactctgttgcccaggctgaggccatgactattcacaagtacgaatatagctcactacagcctcaatcacctgggctcaagcgatccccccacctcagcctcctgaatcactgggactacaggcgtgcaccaccgcacctggcaaatttaattttcaaagtgaaggcatcaataaagatgtgccacgtatataaatctttgacgatcacattaaataggacactaaagaaagcaatctccatctgtattaatacatttcggttcttcagtcgtagcactgacacattaaaaaaaaaaaaaaaaaaggttgttattcccgaactacatacagtacctacactggctatgatatgtgaaacaggactgactctagttttactgacaagcaaaagttctggaagatccaaagaaacagaacaaaaagagaactaaatttacactttctcaaagcttaaaaatctatctccaggctgtcaaatacacaaccctgctgctctaactagctacccttgactacccacctttctcctctcttcaatttatcaaagtgctactccttttacagactgactaaaatgactcctcttggaaaaccttcccaagtcaacagtggccacccaaaaggccatcacaatccttcctttcctctatatcacaagttcttaactgaggccaaaaagcactaaaacaatatataaaaggttgtatgcaactacatttttcgggggagagttttttccatgtaacattcatcataggtttttttttggtttttttttttttttggagacagggtctcactctatagcccaggctgagtgagtacactggcacaatcatggctcaccgcagccttaacctctcaggctcaagcaatcctcccacctcagcctcctgaggagctgggactatggtatataacaccacgtccagccagttttttattttttgtagagacaggttctatgttgcccaggctggtcttgaactcctggacacacacaattctcctgcctcggcctatcaaagtgttgagattataggtgtgagccactgcgcccagcctaatcataagctcttgacctagtatctgtcaagtatctaaatgaggagctacaaactagcatccagtaggccaagctttttctggtgagcagtactgtttatttttttatcttttattttttgagagaccctcactctgtcacccacgctggagtgcagtggtgcaatctcagctcactgcaacctctgcctgctgggttcaagtgattctcttgcctctcctgagtagctgggactataggcatgtaccaccacacctggctaatttttgtgtttttagtacagacggggtttcaccatgttggccaggctggtctggaactcctgacctcaagtgatccacccgcctcagcctcccaaattgctgggattacaggtgatagccaccgtgcccggccaacagtactttttaaacttttgaattcaaacatctttagacaggacatacttgctccagtttagtcacagtttacacaagtccccactccaacaccagcaattccaaacatttcctgttttctgcctgatccctggaggcattggtgtttgcaaccctgagagccccaggttctctacattaacatggaattcagccagatagcacataattgaaccatatcgccctatgttcctcaaattttttaaaaaattttatttaaaaatacttttagttgatatataataaaggtacataatttcagggagcatataatttaatacattcgtataatttataaaaatcaaatcaatgtacttgggatagccatcagcttaaatacttgtcttttctttatgctaagaaccattcaaattctcttctagctattttgaaatgtaaaacagaacagaatattataaactaagtcacccttactgatttatctaacactaggtcttatttatcatcccatatatttgtacccattaatcaacttctcttcatacatttcatttttttaacttaactgttttattggaatgtcactgattaacattaggtatcatgattttaaaacggcctcataaaactagtgactatatggagttgccaaagatggagtcattatattatacactgtcttcttctataaggacaatttcttattggccttagttgcaagaactgtgcatttcctgaacaatttgaaattttatcttatagatctccctgtgcctatctctgtcattggctatacatggctaccgagcacttaaaaggtggccaggccaaactaagatgtgctctgggtgttcaaacaagaggaaagaaaaacaaaacacacacacacattggattttgagagctcaatacgaaaaacaagtaaatatctcattaataattaattatactgattacatgttagaatgacaatattcttgatacactgtgttaaacagaatttatcattaaaattaacttcaccacttcttcctacttttttctttaaaaaaatgtggctacaaggaaatttaaaataacccaagtggcttgcattatatttcaattgcacagcactattatagatgctgaattacgtaagtgttcaaacatattcccctatttgtgttggctgctaagaagcttgaagccaaatttgtgcccatccgtaatacagatgattttatggtcttcatttttatatcagcccaattcctggctatacgttatgtccccacctttatcttcttctttcttacctgcttctaagttcgtgatcttggtagattttgcatacacccacaagatgtcagaaatcttattttgaatgaggcaagaaatgaaatggagctaaatgtttttttttttttatttccacagcatacagggttcacatttataatagcgctcgtctcattctgccatgtattatgattcacagtttacacagtttatcataagtttctaaaagacaggtactgtatcttttaaaaactaacatttatatattgttttacaaagtgttttcacatctactatctcatttctcacaataaatctatgatgttaatacaactgctaactgcattctattggtaagaaactacggcttgggaggtgtactaagccaagggccagaacacaaaatcaggtcctaacactaagtgccatcctcttttgtttctaccagattgctttctttattcaccattcttcctggctcagtggtcaacctagtagagtcctgctcaatatatgggcggggcttctggttctcattttgttttctaacaaggaaaatgaagaaataggcataatggagttaaaatgagtcttaaaggtcacagtctgccaacacttgtcaccttttgacaagtgtccagtttctacttggacagctctaaggccaaaggagtttactacctgctgcagcagtcctggctcttaacaactgctacaaaattctgcctccccgtaatttctaccagttagtcctgattttcaggcacacataaaataagcccgattcccccactgtctgaaagcagctcttatgtctgccattctactcgaatattcccatcttaaacattgcagacctggtaggggagataaacagagccccagtggcaggggtacttacacagacacaggtattatacaggatactcaagcagtccttggacatttcatcacttactgaaagtgaaagggtaatgactggttatttttctcaatgaaaagatagtacaacagttaccacatttttttcagcataagaactgttataatcccctccaagatgattatttttcctttaatatacttcttccagcccctgtctaccaaaggttttcatagtgcccatcagaacctacaagcccatttgcatattgcttttggtttgatacagcagctgttttcttattatgctccacagtcttcataatttcaacctgttgttgtgccatcatttaataaagccattttcccttaatgtcttgcttaggatatatctaggatttgttttttttgttttttgtgttttttggctatttaagtagaccacaaatgaacaacttaatatatatgtgtatccttttcatgtttgtattaaactagttcctcaagatacattttcaaaagtagaactactagaatctaaagtataggcatcttttttttgttcatttgttttggttttttaaatgaggtcttactctgtcactcaggggcacaatcacagctcactgtagtctcgaactcctaggctcaagcaattttccctcctcaccctcccgagtggctaggactgcatgcgcgtgtaccacgcctggctaaaagttaaaagtataagcatctcaattgctcttgttataaatttccattgaaagttctactgcagcaaacaaaaataccatttttatcagactcattaactgagcatttctttttttgttgctgttatctgtgttgggcaaatggctcttaatgtctgatctattactaattcttataaagaaactactacttccctgtgagcaggaacaggaaagtagcataaaaacgaaacttaattttcatgagcccaaaaccaaaagatgatgaaactgagtatgaaccatggacaaagtgctttatttggcacttgcttctattttttaaaattgtttccattcactcctaagctgctaggaatgctaaaatgctaggtctccttctcagatcccaatgggcagccctgccaagctagcttgactagatgggttgtctcataatcctgagacaacgcagacgctctgcatcccttatcaccacctttcaacctactggggctctgtgattgatttatttaacgacttcagagcagggtgaaacactgctctgcatgtctcactatatatctcactatttctagatcctccatttttaaaaggaattgggattcactcattcatcaagtattgttcagcatctactctagagcagatacagtggtgagggaaaaaaagtctcagccttcatggaacctataaatctagtgggaagaagagagactaaacaagtgcaccaacaaataattacaatatgctacttgctatgagggtacatagagaacatgaaagaccaagttagaatacacagctgagacattaaaaatgaatataaatcctcttaataaccactactgcatgcacaaatgaggccttatacagtatgtcgtattggggtaaaaaaaaaatcttttaaattaaaaaaacgcaaagttggtaggagggcattcaccaaacattaactgaagtcatctctggcttttaacaccagagtaaagtgcattcacttttttattttaaattaaataccgaagctgggtgcggtggctcatgcctgtaatcccagcacttgggaggctgaggtgggcagatcacttgaggtcaggagttcgagaccagcctggtcaacatggtgaaaccccatctctactaaaaaaaaaaatacaaaaattagccgggtatggtggtgggcgcctgtaatcccagctacttgagagggtgaggcaggaaaatcacttgagctcaggaggcggaggttgcagtgagccaagatcatgccactgcactccagcctgggcaacagagcgagagactgtctcaaaaaaaaaaaaattgaatacctaaaaagaattatttgtaacgtgtaagttataaaaaataataatagaatattacccatatatctaccacccagcttaagaaatagtgcataccaaaacactctgactttttaccattcacaccctggtaatgcctgaactttttacaaagagcatgtatcacctttctaaaaaaaatagtttaaaaaaaataaaacagagtgatcttactctctcagctagttatatgtgagaaagaagaatttcccaaggaaacatagaagctggatcacaggactatcaaaagtacaaagatgcattctcttaacccagatctgaatttctacgcagtacagaatgaataaagacagctgcttagctgggggaggagagagcaacctgtagctaaatgtaagacatgtccttactattaagagttaggaagggaaggaagaaggcagctgctgggaactgccaccgtatcggcaggttggaaaacaaggaccagtagctaataggtatacttacttttcagtttctgtccccggatagagatcgtaggcctcataagaatttctacaagaagctataaaaaaaattagataaaatcttcaaaattaattcaaagtataacttataaaatgattttgccataaccattcatggcccatgtatctgtcacagtattacaagacccttttgttccaggaggcagttaaggttcagtaaggctcctgactgcagcaagtcaggagacccaggttctagtcccagcttggccacctacttgcccttctctggcctcagctttctcatttttgaaaagaagtattttagattaggtaatctctgggatctaatgcggctttaatttctgaaaagctgcagaacattattactatgattcttctgtttaaagaacatttgtaagtttattttaaaaggactcaaaagatacaccataaattgttaacactgatttctacaggtttgggggttatatgcatgtgttttttattttacatactttaatacaattttgcacaaactgtttaaaataagcatgtatttaaaaattcattctacggagagaaaggatagttgataaaagggtcaatccattagaaagatataacaactacaaatatgtatgtacctaacaatagagcccaaaaatacatgaaacaaaagctggcagaaatgaaggaaacagataatttaaaaataaaagttggacacgttaataactctgctttcaataatagacaactaggcagacgagcaaagaaatagaagacttgaacacaacgaacacatatattctaacagacatctacagaacactccatgcagcaagaacagagtatacattctactcaagtgcacatgaaacattctccaggacagatcaaatttcaggccactgaacaagcctcaataaatttaaaagcacttaaatcacatacagtatgttgtgtggccacaatggaatgaaattaaaatcagaacgaaatttgggaaattcatgaattatatggataattttaaaaacccatcctaaataataatgggccaaagaagaaaccacaaggggaagtataaagtatccaagaaggatgaaaataccaaaacttatgatgtagctaatggagtgctcagagggaaatttatagctgtaaatgcctatattaaaagaaaattcttttttttttttttttttttgagacagagtcttgctttgtctcccaggctggagtgcaatagccctatctcggctcactgcaacctccgcctcctgggttcaagcgattctcctgcctcagcctcagagtagcagggattacaggtgcctgccaccactcctggctactttgtgtatttttagtagaaacgaggttttgccatgttggccaggctggtcttgaactcctgacctcaggtgatctgcccaccttgacctcccaaagtgctgggattacaggcatgagccaccgcacccggccaaagaaaattgtttctaatcgataacctaatcttctaccttaagacactggaaaaagagcagactaaacccaaagcaagcaaaagggagaataagagttgaaacaaatgaaacagagaatagaaaataacagaaaatgaacaaaaccaaaagctggctctttgaagactggcaaattcttaactagactgaccaagaaaaaaggagagaggatacagattactatactcagaaataaaggagagggcattaccaccaaccttatggcaacaaaagtgattataaggaactactatgaacaactgtatgccaacaaattagatgacctagacgaaatggacacattcctagaaagacataaaactaaaaactgacttaagaagaaacagaggctgagcatggttgttcatgcctgtaatcccaagactctgggcggctgaggtgggaggactgattgaagccagaagattgagaccaccctggccaacacagcaagaccccatgtctctacaaataaaataaattagctgggcgtggtggtacgcctatagttccagctacttgggagactgaggcaggaggattacttgagcccagaaggttgaggctgcagtgagctatgatcatgccaatacactccagcctggatggcagggtgagactccatctctttaaaagaaaaaaaagaagaagaagaaggaagaagaagaaagaagaagaaataagaagaagaagaagaggaagaagactacgacgaagaagaagaagacgaagaagacgacgaagacaaagaagatgaagaagaaggcgaagacgaagacaaagatgaagacgaagaagatgaagacaaagaagacgaagatgaagatgaagaaaagatgaagaaaagacgaagacaaagatgaagatgaagaagacgaagacgaagaagacaaagacgaagaagacgaagaagaagaaaaaacagaacatctgaacagccctataacaagtagagactgacttagtgatttaaaaaaaaacaaacaaaaacaacaataacaaaaaactacccataaagaaaaaccttggacatgatggctccattggtgaacaatacaagacatttaaagaatgatcaattcttcacaaactcttccaaaaaacagaagagaaggaaacatttcccaactcattctttgaggcgagtattaccctgataccaaaaccaaacaaagacatcacaagaaaactacagatgagtatctcatgcatatatacacaaaaatcctgaaaaccctagcaaacaaaatccagacacatacaaaaaggattatactccacgcatgatggcttatgcctgtaatcccagcactttgagacgtcaaggcaggaggactacttaagcccaagagtatgcaaccagcctgggcaacatagtgagaccctgtctctacaaaaattaaaaccaaaaattagccaagcatggtagcatgctcctgtagtcccagctactcaggaggccgagataggaggctcgcttgagcccaggagaggctgcagtgagctgtgatcacaccactgcattccagcctgggtgacagagagaccttgtctccaaaaaaaaaaaaaaaaaaaaaaaaacaagaaaaggattatacaccatgacactatgacaaagtggaatttatcccaggaatgtaaggttggttcaacatatgaaaatcaatataatacaccatatcaatagaataaaggacaaaagccaaaagccacacggtcatctcaacagatgcagaaaaagcgtttggaaaaaaaaacccaaaacactttcatgataaaacaatcaacaaggaatagaagagaacttcttcagcctgataaagggcttttattaaaaaacccacagctagcatcacgcttaacagtgaagactaaatgctttcccattaagatgaggaaaaagacaaagatgtccactctcgccacttcaatttaacattgtactgagtgttctaaggcaactagagaaaaataaaaaaagaaattaaaggcacccaaattggaaaggaataagtaaaactaactatttacagatgtcacaatctagaatacagaaaattcctaaagaatccactcaaaaaaactattagagccaataagcaagagttcagcaagatttcacgatatgtgatcaatatacataaatcaactgtatttctaaaattgtagcaagaagcaaaaaaaactggaattatgaaaacaattccatttaaaggagcatcaaaaacagtaaaaacacttagaaataagtttaacaagtgcaagacttgtacaacaaaacatttttgaaagaaattaaagacaatctaaaaaaatggaaagctatcttgtagttcatggatcagaagatttaatattgttaagatgataatactccctaaattgacctacaaattcaatgcaatcactatcaaaatctcagctggcttctttgcagaaattggcaagctgatcctgaaattcacatgcaaatataagggatgcataacagccaaaacaatcttgatctgtaaatacaaaaataaacccgtgtctatgatcagttgatttttgacaaggttgccaagacaattcaatgatgaaagagtagttttttcaataagtggtgctgtgacaactggatagtcacatgcaaaagaatgaaactggacccctgcctcacatgataaacaaagtcaatgcaaatggatcaaagatctaaatgtaagatacaaaatataaaattctcagaagaatacataggtaaatctttgtgaccttggattaggaaatggtttcttagatgcacaccaatacccaagtaacaaaagataaaatgaacttcatcaaaattaaagactttgtgtttcaaaggacaccatcaagagagtgaaaagacagctacttaatgggggaaaatatttgcaaattacaaggaattagtatccagaaactaatacaactcaataataaaaagacaacccaatcaagaaatggagaaagcagatgaacagacatttctccaaaagtccaataataaacagatgatcaacattagtcatcagggaaatgcaaatcaaaaccacaatgagatacctcttcatacctactacgatggttataatgaaaaagacaaatagtaactattggcaaagatgtggagaaattagaaccttcatacactgctggtagatatgtaaaatggtgcagctgcttcagaaagcagtctggcagatccttaaaaattaaacagagttaccagcaactccacttctaggtatataccaagggaaattttttagtaagacaatctaatagaaaatgaaaacacgtccacctaaaaatttatatgccaatgttcatggcagcattattaatcatagcagattactaataatagccaaaagtgggaacaacccaaatgtccatcaactgatgaatggataaataagatgtggtctatccatacagtggaatatttcttgacaataaaaaggaatggagtattgatacacgttatgacacggattaaccttgagaacattatgttaagcaaaagaagccagtcacaaaagaccacgtattgttatgactccatttatgtgaaatgtccagaataattaaatctataaagacagaaagtagattagtggttgcctaaggatgtgggagggaggccttgggaggaaatggggagtggctactgaagaatatggtgtttcttttttggagtgatgaaaatgttttaaaatcaattgtggtgacagtggtatataactctgactatactaaaaaactgaattatatcttttaatatatcttttaaatgggtgacttgtatgacatgaattatatctcaataaagctattatttaaaacaataaaacacctcatgctcagttatagaagctagacataaaaagccacacagtggacgattctgttgatatgaaatatccgtaacaggtgatatggtttggctgtgtgccctcacccaaatctcaccttcaattgtaataatcctcatgtgtcaagggtgggaccaggtggaggtgactggatcatggaggcaggtcccccatgctgttctcgtgataacgagggagtctcatgagatctgatgattttataagtgtctggcatttcccctgcttgcactcactctgtcctgctgccctgtgaagaaggtgcctgcttctcctttgccttctgccatgattgtgagtttcctgaggcctcccaggccacatggaactgtgagtcaattaaacctccttcctttataaactacccagtctcaggtatttcttcattgcagcatgagaacggactgacagaacaggcatattatggacattatggatatttcacaacaggcataatacagacataaaatagattaacggctgccagagctggggagaaggggagatggggagtgactgctaatttgtacaagatttctttttggcgtgataaaaatgttctggttatcactgcacaatactgatgggtggttacaagaattaactttatgtaaattatatttcaataaagctgttattgctggggaggcagggtggctcgtgcctataatcccagctactgaagaaggtgaggcaggaagatcatttgagaccaggagttggagactgcctaaggaacaaagcaagacccccatatctctaacaaatattaaaaaattagccacgtgtgatggcatgaacctgtagtcccagctactcgggagactgaggcaggaggatcactagagcccaggggttcaaggctgcagtgagctaggatcgtaccactgcactccagcctgtgacacagtgcaactctatctctaaaatcatcccaacaatttttaaaagctgtaattaaaaaaaattctgttaaacaaattctaggttaatataaacagaaaaaaataaatgttagaaaggaatactcccgaatcttaacagtggttgaattttggtgacaagtcccaagacagtttttcacattttccttgacaaacaccttttccttttaaaatgagaaaaattaggacctttgttttccaaaaaagtccaattttcacttaaagcatttaaaaattatctatatgctgagaatatgactaagcccatatgtttaaagacattccctatatacgtatgtattttttattattgtttaaatcaagctaggagctaccccagaacaaaaagaaaaattcttccttagccccttctagctataggccaatacttaggcagcatgtccaagacacctcaagccaaatgaagaaggaagattccatagcattttttaaattaaaaagccagcaggcaaatctttgagactagacagttcagcttgagggtctgagaaagcctctgctcatctcaaaccagcaacaaatctttagaaagtaattcacatgccatgagattgctcgtggcatgaatgtgacactataattcaacatcctgaattaagagagatgtgttattttagcttaaagcagcagattaaaaataaaaatcctaaactactacaccacagattgtcaattctagagaagcactgggctcagctttctgcacatctgtatttattgttaactgcacttgcaggagggaaaagaaagaagtctcatgacttgaggcaacaatgaaaactgccctgaacatatgcctgctttgctttgtataatagagacctaaggtcatcctctagaaaaggtgaagtaattattatacagtatataaccattttatagcctgttttcatcatgaattttcccatattactataactttaacattatattaacaacttcataaaattcaacaaaatagatagaataaccattatcttctcctggtagatagtcattacaaataatgttacacctaacggtcttggtatacacaagctttatctcattttgacttacgtcttcatcagagtcacagaaatggaaacaacagggcaaaatgagtagtaatgtttaaagctctgaagtatactacaccaattcttctcaaaagagatcacattcatccaagtaagacgtaagatgctcaagtgcatagaatgtatttaaaataaattaacttcaaatggaagatagactatgtcagtgaataaaagttcctgaatgccaagcaatggcttacacctggcccacaattactgaaaagctggaagatttttacctacaaatctagatttcccataacctctcagggaaacactcaatgggagaggaagagtcatttcctccataaaagcaggcacacactctctagcccaaaacattccccatactcatttaatttatgcagatgagcttgctctgggtctgcttcactccacttagttacatacttcacatctgctttgtaaactctaagacacacttttcacagtcatgttatggatagggtcaggctgacaaggagtgatcccactgagctttgggcagcatgaccaagagaggcttactttgggttcttgctagttattagcagaggaagaaataacaagctgtttggaaaatactaccagcagcaggacagcaagagagttcactaacaaatgcacccaaactgaaggtcagtgaggtgcataattacttaagcaggagcccatgtttataaaatgactgggattcctggagaagctgccctaactcaaagcaggaaagaaaaacccccacaaaatcaagaacagttgatccaaagatgtccgaagatgggataggctcctactagagagccacatttccactgcaaatagacacaggctacagacctacattattatttttcctcccataaatacatcagttcttactaagtagatttcttgatgaaacaattcaaaagtaaagggtctcttgagctagccaagtaagtaaatgccctaggaccaccgacactgctgtggagagggaatgcggagcagcagttaaagaagaaaggctgtggctgatgccatgcatgcagatgtcacactcaatctttactttactggaaaatggtagctttaaacaaaaggaaactttaataattgaagtataacgtgataccgcataaagagtacaatttttttttttgagatggggtcttgctctgtcacccaggctgcagttcatggtgcgatctcggctcactgtagcctcaacctcccggactcaaccaatcctcccacccagcccccatcaagcaactgggactgcaggccatgtgctaccacaatcggctaatttttttaatttttagtagtgatggggttttgccgtgttgcccaggctggtctctaactcctcaactcatgcaatccgcctgcttcggcctcctaaagtgctgggattacaggcatgagtcactgtacctggccatgagtataaattgcacatgtagttttacacactgaacaccattcctgtacaatcgccacatagatcaagataaagactaaccataatacccagaaatgccctctccctcatgttcacttcaggtaatggggttaagggcagatatctaggggagcaaagtcagatcctaacccctcagtcattacaccaaaataaacttcaaatgatgcaaaaatttaaacatacacaataaaaactgtaaaatattagaaggaaataggcatggtttaaatccaacagtgggaaaggcatgaaccaaaactctgaagccattatagtaaaacactgatcaatctgacaatctaaaaattaaacatttctaattttaaaataacatcaaaatttaattctcaaaatagtaaaaaaacacaaatgacaaaggcctttaaaaaatcaaaagcacttacagatcaataagaaaaaggacaaataatcaaatcgaaaaaggtgcaaaacagaaaactggcagaaaaggaactacttataaacacaagaaaaaatatccaatctcagtcatagaagaatgaattttaaaaactatgcagagaatttataaagaactcttacaacacaatattcaaaagagatatatctcaactaagaaattgaaaaaggagagacagacatttctccaaggaagatatacaaatgacaaactcaagaataagatggtcatcattggcaatcagagaaattcaaatcaagaccacaatgagatgtctcttcacactcactagaatggctgtaatcattacagggctggagcgggggctcatgcttgtaatcccagcactttgggaggccaaggctgggggactgtttgagtccgggagtttgagaccagtctgggcaacaaagcaaaacgccatctcagtactttttttttaaattttaaaacactttcaaaatgacagataacaagtgttggcaaggatacagaaaaactgaaacccttatacactgctggtggcaatgtaaaatggcagggcctcttggaaaacattctggcagttcctcaaacaattaaacatagagttaccccatatgacccagcaactgtattcctaggtatgtatatgcctgagagaaatgaaaacatgtccacaaagaacctgtgcaagaatgtttatagcactgttattcataatagcaaaaagacggaggcaatccaaatgcctctcaacaaataaaaaatgtggcatatccacactgtgaaacatcatttgaccataaaaatgagtgttgatacatgctacaacacagatgaatctagaaatcattacgctaagtgaaaagaagccagtcacaaaagaccacatattatataactaaatttatacaaaacgtccacgacagagaaatctatagagacaaaaagtatactagtgtggggagagggggaggaggtggtagaggtaggggagtgctagataaaacacatggagtttcttttttgaggtgatgaaaatgctctaaagttgactgtggtgatggttgcacatatctgcaaatatactaagaaccactgaattgtgtacttcaaatgggtgaaatgtatggtatatgaaccatatcttaataaagctgattaaaaaaaactatggaaaaatatcacttttctcataactgcttagtaaatacttaaaatacactgtttgtggaagggggcttctgggtactggtaatgttctatttcctaatttgggtggtagtgcaaaagtgaatgtattttgtggtaattattggtgtacttttctgtatgaaggttatacttcagtaacaaagtctataaaaatacacacataaacacagtatgttggtgatggtatgggtaaacagacgctcatactttgttcctggggatataaactgacaaaacttcttaggtaggtaaacttcagatttataaacaataaaaaacatacgttcttgttccaaaggtatatactcacatgtatacaaaaatatgtaaaagatctttactgcaaccttgtctgtaagagaaatggtgtggaaaaattataaatgccagtcaactggggcctgggtaaataaattatggcacaatcacaccaggaaacactaaccatttaatttttttttgagagctcatcacccaggctagagtgcagtggtatgatcttggctcacggcaacctctgcctcccggcttcaagcaattctcctgcctcagcctcctgagtagctgggattacaagtgcctgccaccgtgcccatctaattttggtatttttagtagagacagggtttcaccatcttggacaggttggtctcgaactcctgacctcacgatccacctgccttggcctcccaaagtgctgggattacaggcgtgagccactgcgcccggcctaaaattgttttaattaaaaaaaaaaaaagaagaagaaagaaggtacagaatagtgtagccgtgtatatggtatatcactctatgtgcggagaaaataaactaaggtggaggtggtggggaatatttacacacacacacacacacacacacacacacacaaaaaaaacaaaacatcttaagcaggacacacaagaaactagtaatcacaactggttctgaggaggggacactgggaaatttagagatgtacttttcacttagtatttttttaaaaaggtatacaccaatttaaataaatgaattcttctgaagtaaaaactatgctgcttcaacatgtaaatgccgctaagcttctaaaagttaaaatctgaaatgttataaattctgaaatctttcctatctcccatttcaaaagttaaattcccaaaccattaagcagtagtaacagcagtagtaataataaatagctacttacatcaacacctccaaacaagtcaaaaatgtaagtatttggataagtggtttcttgggtaagtttcctctcttcagtaacaaatgccatagcctccatggagagaagaggagaaatttcctagtttttttaaaaaaaagtacatacattgttttagtaaccaacacagaccagacactaaagcatcagtttgagctttagtcccaactggagttcccatgaacacaaagacagtccccaatgaaccacacttcctagtattcaggcccctgtaaagccccttctcacactaaatctgggctggtatgacacacctcaactaacagcatgtggtagaagtgacactaggccacttccagcacaagccttaagaaagccaggctcacacctgtaatcccagcactttgggaggctaaggtgggcggattacttgaggccaggagtttgagaccagcctggccaacatggcaaaaccccatctctactaaaagtacaaaaattagccggatgtggtgctacacacctgtaatcccagctactcaggaatttgaagtacaagaagcacttgagccacggaggcagacgttgcagtgagccaacatagagccactgcactccagcctcggcaacagagggagactctgtcattaaaaaaaaataaaaagcctgacagacttcgctcttgccatcctggaacccaaacatcatgctgtgagaacacagccaatggggaggccataaggagaagaaatgaggccaagagcaacatccttagttgatctccagctgacagccagcaccaacctgccagggatgtgagagagaccattttggacattccagatatctcagtaccaccctacccaacagcacatgaagcagaggagccactcagtcaaccaagaattgttgacagataaatgattcttgttacttccggctgctaggtttcggggtgactagttctgtagcaataaccaagtcactgctcaaatataatctcctgcaggaagtcttcttgatttcccccaaccagaagcatgctcttcagacccccaaaacaatctacaactcatttgtaacatttagcacttttactttgcacctatttacaaaccatttctttttttttttttgagagggagtctcgctctgccacccaggctggagtgcagtggcgcgatctcggctcactgcaagctctgcctcccgggttcacgccattctcctgcctcagcctcccgagtagctgggactacaggcgcccgccactgcgcccggctaattttttgtattttcagtagagacggggtttcaccgtggtctccatctcctaaccttgtgatccacccgcctcggcctcccagagtgctgggattacaggcgtgagtcactgcgcccggccaaacctatgttatttcttccctagactaaacgttccttgaggacaacacaaacagatcccactttgtattccccacagattccaagacagagtatttgatacagcacacatagggtagtagttctcaaactgacggccacagaatcctttgttcatatggaacaaagctaagaggaaaaaaaatcttacaagaaaacctaaaacatagtaagtttcaaataagtacttacttaatgaataaagaaatgatgatcacatagcaaagatatacaaatattaatttccctcccctttaacttcacctcaatctcctgagattttgcaagaagcaaataatgtgcaactctttgaaaagcatttttaaacaagtttaagaagctataattatttctatcagactgtgagattcaaaatatgaaaatgtctcttcttaaacgtaaagactaagtttaattagtttctattacattttaaaataacttactatgtgatataataatcaaaacttcacctctgaagaacactgtcattcagtttcattacgttcaatataacttacatggtttttatttatttatttttgctgttttttattttattatactttaagttctagggtacttgtgcacaacatgcaggtttgttacatatgtatacatgtgccatgttggtgcgctgtacccattaactcgtcatttatattaggtatatctcctaatgctatccctcccccctccccccaccccatgccaggccctggtgtgtgacgttccccaccctgtgtccaagtgttctcattgctcaattcccacctatgagtgagaacacacggtgtttggttttctgtccttaacgatagtttgctcagaatgatggtttccagattcatccatgtccctacaaaggacatgaactcatcattttttatggctgcatagtactccatggtgtatatgtgccacattttcttaatccagcctaccattaaatggacatttgggttggttccaagtcttttgctattgtgaatagtgctgcaataaatatacacgtgcatgtgtctttatagcagcatgatttataatcctttgggtaaatacccagtaatgggatggctgggtcaaatggtatttctagttctagatccttgaggaatcgccacactgtcttccacaatggttgaactagtttacagtcccaccaacagtttaaaagtgttcctatttctccacatcctctccagcacctgttgtttcctgactttttaataatcgccattctaactagtgtgagatggtatctcattgtggttttgatttgcatttctctgatggccagtgatgatgagcattttttcctgtgtctgttggctgcataaacgtcttcttttgaaaagtgtctgttcatatccttcgcccagtttttgatggggctgtttgcttttttcttgtaaatttaagttctttgtagattctggatattagccctttgtcagatgggtagattgcaaaaattttctcccattccgtaggttgcctgttcactctgatggtagtttcttttgctatgcagaagctctttagtttaattagatcccatttgccaattctggcttttgttgccattgcttttggtgttttagtcatgaagtccttgcccgtgcctatggcctgaatagtattgcctagattttcttctagggtttttatggttttaggtctaacatttaagtctttaatcaatcttgaattaatttttgtataaagtgtaaggaaaggatccagtttcagctttctacatgtggctagccagttttcccagcactatttattaaatagggaatcctttccccatttcttgcttttgtcaggtttgtcaaagatcggacagttgtagatatgcggcattatttctgagggctctgttctgttccactggtctatatctctgttttggtaatagtaccatgctgttttggttacagtagccttgtagtatagtttgaagtcaggtagcgtgatgcctccagctttggttcttttggcttaggattgtcttggcaatgtgggctcttttttggttccatatgaactttaaagtagttttttccaattctgtgaagaaagtaattggtagcttgatggggatggcattgaatctatcaattacctcgggcaatatggccattttcacaatattgattcttcctattcatgagcatgggatgttcttccatttgtttgtgtcctcttttatttcattgagcagtggtttgtagttcttcttgaagaggtccttcacatcccttgtgagttggattcctaagtattttagtctctttgtagcaattgtgaatgggagttcactcatgatttggctgtctgttattggtgtataggaatgcttgcgacttttgcacattgattttgtatcctgagactttgctgaagctgctcatcagtttaagaggattttgggctgagacaatggggttttctaaatatacaatcatgtcatctgcaaacagggacaatttgacttcctcttttcctaattgaataccctttatttctttctcctgcctgacttccctggccaaaacttccgacactatgttgaataggagtgtgctgagagagggcacccctgtcttgtgccagttttcaaagggaatgcttccagtttttgcccattcagtatgatattggctgtgggtctgtcataaatagctcctattattttaagatacgtcccatcaatacctagtttattgagagttttcagcatgaagggctgttgaattttgtcgaaggccttttctgcacctattatcatgtggtttttgtctttggttctgtttatatgatggattacgtttattgatttgcatatgttgaaccagccttgtatcccagggatgaagccaacttgatcgtggtgaataagctttttgatgtgctgctggatttggtttgccagtattttattgaggatttttgcattgatgttcatcagggatattggtctaaaattctcttttgttatgtctctgccaggctttggtatcaggatgatgctggcctcataaaatgagttagggaggattccctctttttctattgattggaatagcttcagaaggaatggtaccagctcctctttgtacctctggtagaattcggctgtgaatccgtctggtcctggactttttttggttggtaggctattaattattgcctcaacttcagagcctgttattggtctattcagggattcattcaacttcttcccagtttagtcttgggagggtgtatgtgtccaggaatttatccatttcttctagattttctagtttatttccgtagaggtgtttatagtattctctgatggtagtttgtatttctgtgggattggtggtaatatcccctttatcattttttattgcatctatttgattcttctctcttttcttattagtcttgctagcggtctttcaattttgttgatcttttcgaaaaacgagcttctggattcattgattttttgaagggttttttgtgtctctatatccttcagtactgctctgatcttagttatttctcgccttctgctagcttttgaatgtgtttgctcttgcttttctagttcttttaattgtgatgttagggtgtcaattttagatctttccggctttctcttgtgtgcatttagtgctataaatttccctctacacactgctttaaatgtgtcccagagatcctggtatgtcatgtctttgttctcaatggtttcaaagaacacctttatttctgccttcatttcgttatgtacccagcagtcattcaggagcaggttgttcagtttccacgtagttgagtggttttgagtgagtttcttaatcctgagttctagtttgattgcactgttgtctgagagacagtttgttataatttctgttcttttacatttactaaggagtgctttacttccaactatgtggtcaattttggaataagtgcgacgtggcgctgagaagaatgtatattctgttgatttggggtggagagttctgtagatgtctattaggtccgcttggtgcagagctgagttcaattcctggatatccctgttaactttctgtctcgttgatctgtctaatgttgacagtggggtgttaaagtctcccattattattgtgtgggagtctaagtttctttgtaggacttgctttatgaacctgggtgctcctgtattgggtacatacatatttaggatagttaactcttcttgttgaattgatccctttaccattatgtaatggccttgtctcttttgatctttgttggtttaaagtctgttttatcagagactaggattgcaacccctgcttttttttttgttttccacttgcttggtagatcttcctccatccctttattttgagcctatgtgtgtctctgcatgtgagatgggtctcctgaatacagcacgctgatgggtctagactctttatccaatttgccagtctgtcttttaactggagcatttagcccatttacatttaaggttaattttgttatgtgtgaatttgatcctgtcattatgatgttagctggttattttgctcattagttgatgcagtttcttcctagcatcgaaggtctttacaatttggcatgtttttgcagtagttggtatcggttgttcctttccatgtttagcgcttccttcaggagctcttgtaaggcaggcctggtggtgacaaaatctctcagcatttgcttgtctgtaaaggattttacttctccttcacttatgaagcttagtttggctggatatgaaactctgggttgaaaattcttttctttaagaatgttgaatattggcccccactctcttctggcttgtagagtttctgccaagagaaccgctgttagtctgatgggcttccctttgtgggtaacccgacctttctctctggctgcccttaatattttttccttaatttcaactttggtgaatctgacaattatgtgtcttggagttcctctcctcgaggagtatctttgtggcgttctctgtatttcctgaatttgaatgttgacctgccttgctagattggggaagttctcctggataatatcctgaagagtgttttccaacttggttccattctccccgtcactttcaggtacaccaatcagacgtagatttggtcttttcacacagtcccatatttcttggaggctttgtttgtttctttttattcttttttctctaaacttctcttctcgcttcatttcattcatttgatcttcaatcactgataccctttcttccacttgatcgaattggctactgaagcttgtgcatgcgtcacgtagttttcgagccatggtgttcagctccatcaggtcatttaaggtcttttctatgctgtttattctagttagccattcgtctaatcttttgtcaaggtttttagcttctttatgatgggttcaaacatcctcctttagctcggagaagtttgttattactgatcatctgaagccttctctcaactcatcaaagtcattctccatccagctttgttccgttgctggtgaggagctgtgttcctttggaggagaagaggcgctctgatttttagaattttcagcttttctgctctggtttctccctatctttgtggttttatctacctttggtctttgatgatggtgacatacagatggggttttggtgtggatgtcctttctgtttgttagttttccttctaacagtcaggaccctcagctgcaggtctgtcagagtttgctggaggtccactccagaccctgtttgtctgggtatcaccagcagaggctgcagaacagcaaatattgcagaacggcaaatgctgctgcctgatcctttctctggaagcttcatctcagaggggcacccggctgtatgaggtgtcagtcggcccctactgggaggtgtctcccagttaggctactcaggggtcagggacccacttgaggaggcagtctgtctgttctcagatctcaaactctgtgctgggagaaccactactctcttcaaagctgtcagacagggacatttaaacctgcagaagtttctgctgccttttgttcagctatgccctgctcccagaggtggagtctacagaggcaggcaggtctccttgagctgcggtgggctccactcagttcgagcttcccggccgctttgtttacctacgcaagtctcagcagttgtggacacccctccccctgctttgctgccaccttgcagtttgatctcagactgctgtgctagcagtgagcaaggctccgtgggcatgggaccctccaagccaggcgcaggatataatctcctgctgtgccatttgctaaggccgttggaaaagtgcagttattagggtgggagtgtcccgattttctgggtaccatctgtcatggcttcccttggctaggaaagggaattcccccaccccttgcgactcccaggtgaggcaatgccccgccctgcttcagctcacactccgtggactgcacccactgtctgacaagccccagtgagatgaacccggtacctcagttggaaatgcaaaaatcacctgtcttaggcatcgctcatgctgggtaccatagactggagctgttcctatttggccatcctggaaccggacccccacttacatgggttttaactgcattagagctggtgctctaaattcaaatttagatccaaactacagctaaagtttagatactccagccctactgaatcagaatttcaggggtggggcccagaactctgtgttttaacacgctcttcaggtgattcataaacacactccagtttgagaacaattatcctagcataatgtctccgtgctctttccactcatttcccaatcatcaaacctggccccttcaatcttcttacgttagtaataatattcaacaaccataaggcctcttccacgagccttcagcagtatgtaatcttctaaacccttttcaaaaagaatgtcatcccaatcacaggatagtgttgacctcccaaaattaagcaagcactgccacaaaataaacacacatagagcccaaaaggataacacagggaacctaatggtgattatcttgggatgatgggattataggtgatgtatattttcttctttgtactttttctgaatttctcaaattttctatagctcacacagtaaaaacaggctatttttaaaagccaacggaagggaaaaaaaaaacagcagacatcttgtgtcacctagaggccctgaatacgcccctccaaggtccttaagagttaccttgaggatgttttgacactcaacaaagtcactgtggaggtggctggtggtgtgcagcttgaggagcagctgaggaattccactccacttggattgtttgtccctctccgtcaaaaaagtctcagtgaactgtgagtcaaaaaaagagagaacatattattgtattattgatgataatagctgatacggcaaaggagagcagccgacttccaaacccacccaggacagttacaaatttatctctaagcactactataaaaagcctctttctataaatcttcaaaacctccccaacagcctattactatgttataataagaaggagggattggaaatactcttgtaccactcacaaacagcacaatatcattgagagtggacttagactcgtcgtaaatatatactggaaattctagggcaactgctaaaagtatttttacaagaagaataattgatatgctaagagatgaaaaataatggaaccatataaactgctcagttaagcccataaaaggcagaaaaagaggggaagacaaagaacaagtataataaaacaaacatggtatacattaatccaactatatcaataatcactgtaaatatctatgaatggtctaaacttaccaatcaaaggaaagagactaaaagaatggatttaaaaaaccaagatccaacaatatgctgtctacaagaaactcatttaaatatacatatagataggttaaaagtaagggaaaaggccaggcacggtggctcacacctgtaatcccaacactttgggaagccgaggcaggtggatcacctgaagtcaggagtttgagaccagcctggctaacgtgataaaaccccatctctactaaaaatacaaaaattagctgagtgtggtggcaagtgcctgtaatcccagctactcgggaggctgaggcaggagaaccgcttgaactcgggaggcagaggttgcagtgagccaagatcgcgccatggcaccccagcctgggcgacagaccaaaactctgtctcaaaaaatagaaaaggggatggagaaagataaatcacataaaaagaaagatggagtagttatattaatttcagagaaagcaggcttcataaaaaaattatcagaaataaagtgggtcatttcataatgacaaaggggttaattctccaagaagacataacaatccttatcatatatgcacctaacaacagcatgtcaaaatatgaggcaaaaactgcctaaaagaactgccagacaaaaaaatggcaaatcaactcttacagttaaaatattttaaactaaatgaaaatataacttatcaaaatttgtgggatgcagcgaaagcagtaataagccagaagtgtatatcactgaatgcatataatagaaaagaagaaatatctatagtcaataatctaagcttctaccttagtaaactacagaaagagcagtttaagcctacagcaaacagaagaaaaaaataaaaatgagagcaaacatcactgaaattgaaaacaaaaaatcaagagagaaaacaaaaccaaaagttagttctttaaaaagatcaatacgattgataaactctaaccaggcttatcaagaaaaaaagacagaaacacaaattactaatatgtggtacataagaggagttattattactgactccatggacttcgaaggatgataaaggagtattatgaaccgtttgccccaatatttgcctagcactttgggaggctaaggcgggaggattgcttcagctcaggagttcaagaccagcctgagcaacatagcgagagctcgcctctactaaaaataaaaaaaaaaaataagccaagggtggtggtgcacacctctggtctcagctactcagaaggatgaggtgagaagatcacttgagcttgggagaatgaggcggcagtgagctatgacagcaccactgcactccagcctgggtgacagagcaagataaaaaaaaaaaaaaaaaaagacatcattataaccaaagagtgaaacaactcaaatgtccatcaactgatgaataaataaaatatagtatatccatccaatggaatattattcagcaaaaaaagtaatgatgtactgatactacaacaaggataaatcttgagaccattatgctaaatcaaagaagccagtgtctaactgggcacagtgtctcatgcctctgatgccaaagtaatcccagcactttgggaggccaaggtggacagatcacttgagctcacaagtacaagaccagcctgagcaacatggcgaaaccccacctctacaaaaaaaaaaaaaattagccggatgtagtggcacatgcctgtagtcccagctactcgggaggctgaggtgggagaatggcttgagcccaggaggcagaggttgcagtgagccaagactgcgccactgcacttcagcctgggcgataaagccagaccttgtctcaaaacagaaacaaaaacaaagcgagactccatctaaaaaaaaaaaaaaaaaaaaaacctaaaagaagccagtctcaaaaggccatatattgtctgattctattaatttaaaatgtccagaataagcatatccagagacagaaagatcactggttggcaaaggctgtggggatggggaaactggggagtaactgctactgaataccaggtttcttttttgggtgataaaatattctaaaattgatcgtgatgatagatgcataactttgtgcatacagtaaaaaccactgacttgtacacttcagttttttttttttttacccttttatctccttagtttaccaacttgtacactttaaaagggtgacttgtgcaatatgtgaattacatctcaataaagctgctataaaaactaaataaataaatgaacataagtgaactttttaggatgacaatgttctaaaaccagattgtggtgatggttgcataacttcatcaatttgctgaaaatcactgaactgtacacttacaatgggtaaattttattgtatataaatcatgcctcaataaagttgtttaagaaatatttaaaagaagaaagaagagaaaagggaacaaaggataggacattaaaaaagcatatattgtattaagcaagtataaacaccaaaatgtcagttattacattaaatctaaatatgctaaaatgctccaattaaaaacaaagtttgggccggttacagggcctcatgcatgttactgcagcactttgggaggcagagacagacagatcacttgagcccaggagttaaagaccagcctaggcaacacagtgaaaccctgtctctaccaaaggaaaaaaaaaaaaattaggcatggcagcatgtgcctgtaatcccagttactcaggtagctgaggcaggaggatcccttgatgctaggaggccgagactgcagtgacctgtgatctggtaccatactccagcccgggcaacagaatgcaaccctgtctcaaaaaataaatagaaaataaaataaaataaaaataaaataaaataaaataaaaacaaagtttgttatgccacctaccagagaaacagaaaggctaaaagtaaaagaatgggaaataatactcaatgtaaacatataccaaaaggtagtataactatattaaaatcagcaagagcaaagaaaaagcattaccaagccaggcatggtggctcacacctctaatcccagcactctgggagaccgagacaggtagatcacttaggtcaggagttcaagaccagactggccaacatgatgaaaccctgtctccactaaaaatgcaaaattagctgggcatggtggcacaggcctgtaatcccagttactcgagaggctgaggcaggagaattgcttgaacccaggaggtggaggttgcagtgagccaagaatgcaccattgcactccagcctgggtgacagagtgagactctgtctcaaaaacaaaacaaaacaaaaacaacaacaacaacaaagtactaccagagataggcactttaataaggataaaaatggcaaactggataatgttaatgatcctaaatttgaaaatatctaataaaaacttcaacatacataaagcaaaaactgacaaggctaaaaggagaaataaggaaatccataatcataatgggagattttacacatctctttcaaaaactgatatatgcagacaaaaattagtgagaatacagaatattttaacacaattaaacaaaatggacacacctcgagcagtatatctagtaaatgcactctacatgtcctttacaaatacaaatagaacatttgcaaaatgaccagctgctaggccatactgcaaatgtcaatacatttaaatgaactgaaatacagactatgttccacatcagaaagatagttataaaatccccatgtttggaaaataatatacttctcaaaaatgcatgggtcaaagaagaaatcgaagtggatatatgaaaatatcctgaaagataatgaaaatactacacatccaaactgatgaggtacaactaaagccatgcttactgaccattataaccctgataccaaaacctgtcaaaaggaaaactgcaggccagtttcactaacgacgatgtaagggaaaaaccacaattcaaaaattgaattaaatttaaaatttgtatcagaaattaaaagttggtttaatatttgaaaattttattcaatgcaattcaccacattgataacataaaggagaataattatttgataacataaaggagaataatgatatgaatacctcaattgatacagaaaaagcatttgataaaatttaacatccattcatgataaactcaaataaaaaaatgaatttctagtaacaggtatccacagaaaacccactgcaaacatcatacttaatggcaaaatgtttaaggttttttccctcttagatcaggaacatgctacttctattcatcatactggaggtctcaggcagcagagtaaggcaagatatatagaagacataagattggtaagggtaagataaaagattcatttgcagatgatataatattcacagatgactgtacagtatacaatccaaaagaacctaaatgtaaattatcaactattacagcaatatacatgaataatataaaaatctatcttatttttatattacagctacaatttttaaatgcagttttaaaaacactacttacaataccacttttaaaaacgctaaggaataaatctaacaaagttatgcaagacggctacatagaaaactgtaacacactcttggctgggcacagtggttcacacttgtaatcccagcactttgggaggctaaggtgggcagatcacctgagatcaagagtttgagtctagcctgaccaacatggtgaaaccccatctctactaaaaataccaaaaaaaaaaaaattagctgggcgtgatggtgggcgcctgtaatcccagctactaggggaggctgaggcaggagaatcgcttgaacctgggaggcggaggttgcagaaagctgagatggtgccactgcactacaatctgggagacagagcgagactccatctcaaaaaaaaaaaaaattacaggaaaataacttccaatttatacttctatacccagtcaaactaaatatatgtgtcagaataagacattttctgatctgcaagctttaaaaaaaaaaaaaaagttacctcccatgtactctttcttgggaggctaccagagagtgtgccccaggaaaaaggaagacaattgaggaaacaaggtctaaaacatgagaaaagaaagaaaaatgctctggatttggtgaagagaagtcccaagaactcagctgtatagcagacctagtaagcagctaaactaaactgctaaactgctaaactgcagtaggggaatgaagggcttcaaatgatttctttaaaaaaaaaaaaaagttttagaatttaggaacaaattataagtatacagaaagcaggccgggcgcggtggctcacacctgtaatcccagcactttgggaggccgaggtgggtggattacctgaggtcaggagttcgagaccagcctggccaacatagtgaaaccccatctctactaaaaatacaaaaaaattagccagacttggtggcgggcacctgtaatcccagctactcggggggcataggttgcagggagccgagattgcgccattccactccagccgggcaacagtgcgagactccgtcccaaaaaaaaaaaaggtatacacaaggcaaaacaatttaaaaggatgcattatacctgacttcaccaccatgcgatacaccaatgtagcaaaatttcacttgtaccccattaatacaaatttaaaaacagtaaaataaattaaaggatgcactattatgctaatgaaagtcaaaagggtatatgtatatatgtgtgtatatatgtatatatgtgtatatatgtatatatctatatatgtatatacgtatatatgtgtatatatgtatatatgtatatgtatatatgtttatatgcatatatgtgtatatgtatatatgtttatatgcatatatgtgtatatgtatatatgtttatatgcatatatgtgtatatgtatgtatgtttatatgcatatatgtgtatatgtatatatgtttatatgcatatatgtgtatatgtatatatgtttatatgcatatatgtgtatatgtatatatgtttatatgcatatatatgtatatgtatatatatacagggtatatgtatatttatccttcaatttaaaaaatggaagaggactgtttttaacactacaaaaaaattatataaaacaaatataattgtacaatatatggccctgctgtaaataataatgctaacatcataatgtaaatacttaacaacagccaaagctgtgatataactacattggtagactagtggagacgagtaagaaggaatcgaatgtgtgaattaaatcctagtctttcaagagcgaagaaaatagatagtatctaaaagtgaaaagaaacagctttataaccatgttatttagaaatactggctctcctgtttcctggatccttctcttgcaaaagaaatagctaagtatggacactgaacagcattaggagtatggaacttagaggtgcaaagcaggcagggcactgctgtttttttgttacaagctccatgatacgcagagatctaatcacagtccaaatatttgacttcacaagcaatttctttactatttatacattgtcttacaaggcatgtactctcatttaaaaataataatttggggctgggcacagcggcttacactcatatcctagcacttgggaggccaaggtaggcccattgcttgatcccaggagtttaagaccagcctgggcaacatggcagaaccttatctctacaaaaaaatacaaaaatgagctgcgtatggtggcatgcgcctatagtcccagatactcgggaggctgaggtgggaggattgcttgagcccaggaggcggaggtttcagtagttttttttcaccactacactccagcctgggcaacagagcaagaccctgtctaaaaaaaaaaaaaaaaatcattagaattttgttttccttgtgaacagctcagcactgtgacaaaagtgccaccattcagtcatcttcccagttgaattactggcaggtatcacatgggttttctcttgaagtacttgtggtttaacagtttacagcagtgataatctcttacatcataccctctaaactgtcaacctgtttagcaaatatgacatttctagacatttacagtttccactgattttattgtttttaaaaataactaaaggctaaattccatgaagataactgtgcatcttatttgtttctttaatcctaaatgtaagacatctaatgcctcaaaataccacactaaatgcaagggtctcgcgcaatctcactgcaacctccgtctcctgggctcaagtgatcctcccacctcagccctgcccccttccccctcccagccccccacaccaccaccactgccaccaagtagctgggattacaggcacgcaccaccacgcccggataattttttgtatttttagtaaagatggagtttcacccatcttgcccaggttggtcttgaactcctgagcttaaagaatccgtctagctcggcctcccaaagtgctagaattacaggtgtgagccaccgcacccagcctaaatagatatcttaaaggataataaagataaaataccttgttgggttattctgacaatacatgttaaccactgaatacttttgtgtcctttaatggggtatgattcagtaaaattaggagcaaatttaagggcttgtgaatacgaaaacttcccattgaaatgaatggcatatgtgtgtgtgtgtgtgtgtgtgtgtgtgtgtgtgtgtgtgtgtgtatgtgtgtgtatatatatatgtgtatatatatgtgtgtgtgtgtatatatgtgtgtgtgtgtgtgtgtgtgtgtgtgtgtgtgtgtgtgtgtgtgtgtgtatatatatatgaataagactttatcctaatcaggagtttttcagtatcaaattacctttgaaaagccaggtaagatttgtttgacttaaatgcctaggtttcataaatactaatggttagaatgaggctaaaacaagtagtgcctaatgaaattttttttaaaagttagtgaatctggctgggcacggcgactcacatctgtaatcccagcactttgggaggctgaggtgggtggatcaagagatcaagagtttgagaccagcctagccagcatggtgaaaccctgtctttactaaaaatacaaaaagtagccgggcatggtggcacatgcctatagtcccagctactcaggaggctgaggcaggggaatcgcttgaacccgggaagcggaggttgcagtgagccgagactgtgcactgcactccagcctgggcaacagcacgagactccatctcacaaaaaaaagaagtcagccaggcgcagtggctcacacctgtaatcccagcaccttgggaggccgaggtgggcggatcatgaggtcaggagatcgagaccatcctggctaacacggtgaaaccccgtctctactaaaaatacaaaaaaaaaaaaaaaattagccaggcgtggtggcgggcacctgtagtcccagctactcgggaggctgaggcaggagaatggcatgaacctgggaggcggagcttgcagtgagctgagattgcaccattgccctccagcctgggcaacagagcgagactccatctcaaaaaaaaaaaaaaagtcagtgaatctaaagaaaaaatataaagtaaggaacactcaggggcatttagatatgccaataatcataaaggaagcaacgactgccatgtgggaaatataacagcatcccacaacccagtctgtcaccagattgccaaactgaagggcatccagggatggcgggtcatgacctgtaatgtgagctgcactatcctagagcccagcgtttactcagtctatcctttccttcaactcgtactgatcatttggggccttgtacgcccatggtaaggaatccagaattgattctatcaactgcaatgagatgaggctggagagttttaagcaaaggatttataagatctgatttgcattaagcatcaaatgtgctgatgaatatgaaaaggctcagtaaactccaaagtatcaccccagcatattttattgccttgacagagggcagaacaaaacgaagggaagaaaataaagcaaactaaaatccaagtagaattgacccattacaaattatgtggccagtagtcatgactcaggcttcccttatgccccatttagggagatggagaagatcaggtctgatggaaaagggagaggattttggctttcgacatactaagtttgagatgcccattagacatcaaagtggaaatgctagaaggcaattggatatacctacccatccagagctaaaaggagaaacacgaatggaaacagaaacttaggatccgtcagcgtatagagcagttattaataacaatacaagctaatctttatagcagtaagctatgtacttatagctgagaaagtatgtttcagtcactattttaagtgctttatatgtacaactcacttggtcctcaccacaaccttggaaggtcaggtcctatgatacttactttacaaataaataaactgaggcataaacagattaaataacttgcctaaagacacatagtaagtaaataccagagctaggtttcaaacctaggtaatctgactctggaactctttaaagccatgagattgcttggcaagtacagacagaaattagactgaggacacagtatttcaatttaagcaatttcctgaatatcaaatggctggcaaggtttcaggctctgcagatacaatgaaaaataagacacagtctcttcaggaagcccagtctaattaactactagctgagagcaactatttactaaacaactattcctatatgccacactggctacgcttttaaaacatattatttcacttaatcctcctaacaactttatgggatagatgttatcatcacctctttagaaataaggaaactgaagttaagagaggttaaataacttaatcttggtcaccctgctaggattcaattcaggtccaccttactttaaaatctgatttttttttccaaggaaattccatcacatgctataccacagatgatccttgaggacattatgttaagtaaaataagccagtcacaaaaagacaaatactgtattactatactggggttatctaaagtagtcaaactcacaaaaacagaaaggagaagaatggttaccaaggactgggagggagaaatgggaagttgttcaatggtagtttcagatttgcaagatgaaaaagttctggaaatctgtttcacaacaatgggaatatacttcacattacttaactatacaccttttttttttaagatacagggtttcaccatgttgcccaggctggtctcaaactcctgggctcaaacaatccgctcacctcagcttcccaaagtgttgggattacaggtgtaagccaccacactgggcctgacctatacacttataaatggttaagatggtaaattttatgtttacatatatatatttatatatgtatatagtttgaggcagggtctcattctgttgcccaggctgcagtgtaatggtgtgatcatggctcactgcagccttgacttgccaggctcaagcgatcttcccacctcgggttcctgagcagctgggactacaggcatgcatttccacacctggttaatgttttttttttttttttttgtagtagagctggggctccaccacactgcccaggcttgactcaaactggctcaggtgatcatcccatcttggtctcccaaagtgctgggattacacacatgagccaatgtacctggcctatattatatatttgtttactacaatgaaaaaattttggctaggcgcagtggctcacacctgtaatcccagcactttgggaggacaaggcagggggatcatgacgtcaggagttggagaccagcctgaccgacatggtgaaaccccatctctactaaaaatacaaaaagtagccaggtgtggtggcacacgactgtaatcccagctactcaggaggctgaggcagaattgcttgaatccgggagacggaggatgcagtgaaccgagattgcgccactgcactccagtctgggcaacagagcgagactccgtctaaaaaataaaaaataaaaaatgtttaaatctggtcttttcctactataccacatgccataacagtataaaaatatgggtaatctgggcaacagagcaaaaccctgtctctaccaaagatacaaaaattaatggggtgtggtggcacacgcctgtagtcccagctactagggaggctaaggtgggaggatcacttgagcccaggaagttgagcttgccactgcactccagcctgggtgacagagcaagattctgtctcaaaaaaaaaaaagggtaagcaaataacttattctgcaggatgggagagaggagcggaagggcacagcatggaataaattaaaaaaaaaaaaaactaagaaaagaaatatttgaaagatgaaggtccccattttatcctcactatagctccaggcagggggtctctacttcaacttctgaaatagctcccacacctatatacaaccatcagttaccacaataacctgccttgcttttgtggctccagaatattccagcagccttgtatctggtgagctttttttttttttttttgagatgaagtctcactatgtcacccaggctggagtgcagtggcgtgatctcagctcacaacctccacctcccaggttcaagcaattctcctgcctcagcctccagagtagctgggattacaggtgcttaccaccacgcccggctaatttttgtatttttagtagagacggggcttcgccatgttggccaggctggtctcaaactcctgacctcagatgatccacccgcctcgacctcccaaagcactgggattacaggaatgagccactgtgcccagcctctggtgggcttttctaggctcctcccattctaagtcattcagcactggaaacaaattaagttgcctaaattgcctcatttatcatgctaaagaacttctgtggctccctattattctcagaacactgattatcaggatgggtgtttaggaacatatcatctaacctctctgagcctcagtttcctcatccatattaagaaatgagtcttgaagcataactcaaaagcttgaggattaaagataacatatgccttgtaccgtactttttctaaaggttatgtgctcactaaaagttagtcctctttctgcctgtctctacacacccagctcggtaaggtatcttagcttaagaaggaaagagcaagtatttctaggatttttttttttttttgagacagggtctcactctgtcaatctccgcctcccaggctcaggtaatcctcccacctcagcctccccacaggcacacaccaccaccatgcccggctaaatttttggagacacaggattttgccgtgttgcctgggctggtctcgaattcctggattcaagcgatctgcctgcctcggcctcccaaagtgctgggattacagggtcttaagtcaggtcttaagaacacaagggggaaaaaggctgctcatctatggttgtgtgatggccaggaaaacatttctcactcacaactgctcctttcgtccacagtcctccatacacacagaccccctagcctttattttattctatccttttcgtcatttgaggaagtgatattcaaattaaatttaaataaagttacactgtgaaaagtctcactcccattttctccccctttagcccaattcccacctcactcccaccaaccactttatcagtttcttgagtatccttcaaactttttatgaaaaagctgtctttaaataaagctaatgttttacaggtgttagcaaggttcggggtgggggagggtggaagaagtagtggactaggtcctattcaacctggtttaccctaaagcagtgtccttcgctcactcaaaaataacaataatcatatgttgggcacctgttataagtcagatgcttaatattaactaccttcagcccttagtatgcaccagaaatgcactaatgctttacacaattgccccctttgatctccacaacaatcttaaaaggtaggttactaattctcatcttcatcttacaagtgaggaaactgaggcacagaaaggtcacctgcccaagcaagagagaggagcagggctttgaacccaggcctgactccagagtccctcttaaccgtgacgctctacactagcaaaccagatatagtctctgcacccgctggaactcagcctaatgtgggagacgggcgagaaaaaggcagacaacaaagaaatacgaaattatagactaagaaagtaatgtaaacgaaacgaattcgcggctgtgacagaataacaatggggacctactttagaaaggggaaggaaagagtgtcaaggaaaggcctgagaaaatgacatttatgaaatgctcgggaaccatttgggggctgcaatgatgaccccctcccccacgcccaatacacgggataaactcgaggcccacagaggctaaaacaaacacgacagggtcccccagacgtgtagacgtggcgcaaagaagggaggatccagaaactgggcccagggttcgtacacgccatcagtgtccacagcagcccagccccgctcggcccctgacaagggacatcaagccagctgcttcccacggccccgctgcagctgagagcgtccgggcagctcacagggaggccttccggccagccaaaagggctttggcccgtccagcggcggcctggaaaggcctcttccccggccccccgccagctcccgcctggtccgccccgccccgcccctcctggtccagcctcgtacctgcaccgcccggaccaggccccggccggtcagctggccctgccgcagctgcagcagaatgttaccaggccgcggccggccgccccatccgccccaagccgccactgtggctgccgaccgtctccctcggccggctccagacccagccgctaccggcgccgccgccatgtctcctcgtcggacaaacaggaagcaagcggcctcggggccgcggagatttctacggggcggcggaggggtcgccgcagcgcccccagtgggccgtcggcggaggcgcaagccgcgtggcagggaccgtgtgcggcgtggaggctactgggaattgtagtcctgcgcggcagcggggtaggtgggaaaagagatgtggcctttcctgcactgccggtttctctggcccccgggcccagcatttcggcgaaatctcccaaggtccacattctcccatttctctcgccgatttgggcaggatgcaggcagctggccaagaaatgatcctgggcttcaggtcaggagtcaggccctcgagtccgcttcctgcctgcttctctctacacgtgactcaccgcggacatcgaccaagtcatcgcgctctgccactgcgcctgtgtcctcgtcaggtcactccatctatagattctgggagcctgatcaatcgtagttcctggggctttctctgcgcccgacaccaaaccatgtctaggggaaagggagggtgtctgggatacagtggtgagcagaacggcctgggatcctttatcacgaaatgcaggttacaggggaagacagcagatccatacacaaagaaacgcagtctcaaactggataagttgtgtaactgggtaggttgttgtgaaattaaataatggaagggaaagggattagtaaattgtgacatcatattctctgtcagatgaaaaccctgtcctaatttctatccaccagatagcatgttgtctctaatactcattttttcagctaacttctgtggcaggatggcactgactccccccacccaacacacacacactttttcccttcctagcagggggcctgtaataaaaatgaaagaggagagctaagtgtgatgtaacagggaatggtgaagattgtgactcataactaagatgactgtaacttactgctcaaaccagaacactttaaagaatgaaaagacacaataaataattacaccgggacggtaggcataaaagtgactctcccaggtgaactggcactatggttaccatcctcacaccccatctaaaaggagtagactcaccatccatcttcatagaactagaaaaaagaatcctaaaaatcatatggaaccaaaaaagagcctgcatgtccaaagcaagactaagcaaaaagaataaatctggaggcatcacattacctgacttcaatctatacaataaggccatagtcacccaaacagcatggtactggtataaaaataggcacatagaccaatggaacagaatagagaacacagtataaaaccaaatacttatagccaactgatcttcgataaagcaaacaaaaacataaagtggggaaaggacaccctattcaacagctggtgataactggcaagccacatgcagaagaatgaaactggatcctcatctctcacattatacaaaaataaactcagccgggtgcagtggctcacacctgtaatcccagtggctcacacctgtaatcccagcactttgggaggccgaggtagtcagatcatgaggtcaggagttcgagaccagcctggccaacatggtgaaaccccatctctactaaaaatgcaaaaattagctgggcgtggtggcatgcacctgtagtcccagctacttgggaggctgaggcaggagaatcacttgaaccctggagacagaggtcacagtgagccgagatcacgccactgcactccagtttgatgacaggatgagactccatctcagaaaaaaaaaaaaaaatagccaaagaagttacagtcaggagatattttgttccctatagaaactgaatataacatcttaaaatttgtccctgagtgttgtttcttagaaactcgaacccccaccaaatggatctgctgataggcaaactcagataagggagagctgagaactaaactttgacttctattttttgttataaatttcttcctagggggcctggaggaggacacgaccataagtcagagctaacattcttttctgcagatcccaaatttttagacaaagctttacctccttaaccaattacaagtcagaaaatctttgaatccacttgtgggcccctggttggagatgtcctgtctttttaggtggaaccaatatacagcccctatgtattgatttatgacttcgcctgtggcctctgccctcctgccattaaaaacctgtaagccggctgggcgcggtggctcacacctataatcccagcactttgggtggccgaggcaggtggatcacctgaggtcaggagttcgagaccagcctgaccaaaacggcaaaaccccgtctctactaaagatacaaaaattagccaggcatggtggcacgtgcctgtaatcccagctactcgggaagctgaggcaggagaatcgcttgaacccaggaggcagaggttgcagtgagctgagattgcaccactgcactccagcctgggcgacagagcaagactctgtctcaaaaaaataaaataaaacccctgtaagccataagggagttcaggtcttaagcataagctgtttgattctcctcgcttggcaccctgcagcaagtgcaataataaatgcctcactttctcttgctgtaatcccaatgtcagtggctttgctgcaccaggtaagcagccctcactttggttcaataacaatacttttcataactttttgcaccagctatgtatcatttctagattcaagaaaaaaaagtcttctaatatgtgaaattaactttaaaaagacataaaaagaaaaggcatttccagggatacaaacagggcattggtgagctgtccgggcagcagccagccttaccagggaatccacagcccagggattccacccagagctcttcctgaggcatatggtgatggatattctcacccttgtcgcggtgaggagacaggatcctgactaatttcacagttcacatggccctccaggtttcccttggcactcatcatgctagggacaaatcttcccacctcagctttgacccaactgcaaatgtcactttccattcctcagttcctatctttgtcagtctagcctggcccaggcattcaccaaagctgggtattcactgggtcaaaaatgacaacctcaaattcagtccttacagataccatgtgaccatgaagtaaggggacatgtttccagaaacctctgtggaaagacactcttttccacttcacctctgctctgccagccttttccgtagaaactagctgaggctaggcgcggtggctcaggcctgtaatcccagcacttttggaggccgaggcgggcagatcacgaggtcaggagttcgagaccagcctggtcaatatggtgaaaccccgtctctaccaaaaacacaaaaattagctgggcggggtgaagcgcgcctgtagtcccagctgccctggaggctgaggcaggagaattgcttgaacccgggaggcggagtttgcagtgagccgagatcgcgccactgcactccagcctgggccacagagcaagactctgtctcaaaaaaaaaaaaaaaaagctgagtgtctctcaccaccagagggcgaagtacctctcccaccagaggtctgttgatgtcaattttaatcagcactagaaaaaaaatgaagctcccaaactggctaattttttttccaccgtaatcccaaatggcttaaccaaacatgatgatgctattcagagaacattaactcttgtaaataaatcgccaaactcatctcaattgggcagacagattttctgggacttttttttttttttttttttttgaagtcttgctctgtggcccagcctggagtacagtggtgtgattatagctcactgcagccgccaagctcctgggctcaagcaatcctcccgcttcagcctcccaaagtgctgggattacaggcatgagtcatggcaccctgccaagaagtcactttaatcaaagcaactggcactgttatatcaggccatggtaacagctgtcccatgcaactatgcattgtcctgtggtgtcattttttacagtgatttttttttacattacatttctaatgtacaacctctccatgatttgtcttttaaatgtttgttaagtactatcttatgtgccaggcactgttataggtgctgtggatattgtgctaaataaaataaacaaaatttcctgccctcatggggcttatacttctgggtaagatctaccctttattgagcacttaccattggccaagcactttctttgcactatcttattattctcgcagcatttttggggaagtttttcaaatctacagaaagttaaaagatacaccattaacactcatataccctttgcttagacttgtcagctactaaaactatattttatctttctctctgtgtatatatacacatatatgtacatatatgtgtatatatacatatacatatatacacatatgtacatatatgtgtatatatacatatacatatatacacacgtgtatatatacatatacatatatacacacgtgtgtatatacatatacatatatacacacgtgtgtatatacatatacatatgtacacacgtgtgtatatatacatatgtacacacgtgtgtatatatacatatgtacacacgtgtgtatatatacatatgtacacacgtgtgtatatatacatatgtacacacgtgtgtatatatacatatgtacacacgtgtgtatatatacatatgtacacacgtgtgtatatatacatatacacacgtgtgtatatatacatatacacacgtgtgtatatatacatatacacacgtgtgtatatatacatatacacacgtgtgtatatatacatatatacacgtgtgcctatatacatatatacatgtgtgcctatatacatatatacatatatgtgtatatatacatatatacatatgtgtatatatacatacacatatatacatatacgtacatatgtgtatatatacatatacatacatatatatgtgtatatatacatatatacacatacatatatgtatatatacatatatgtatatatacagctctttccatatatgtatctctctctatacttcatttatacgtagagagggtttgtgttagttttgctaaacatttttttttttttagacagggtctcgctctgttgcccaggctggagtgcagtggcacgatcatagctcactgtagccttgggctcctgggctcaagggatcctcccatctcagcctctcaaagtgttgggattacagatgtgagccactgcacccatcctgctaagccattttttgctaaaccatttgaaagtaaattgtagatattatgacacttcacctgcatattttagaatgtatctcctaagatcaaggacatgctcctaaaaactatgataccatcacacccaagaaatttaatattgatacaatttatctttttttaaatttatttatttaagacagggtttcactctttttgcccaggctggagtgcaatggcacaatctcagctcaccacaacctctgcctcctgggttcaagctattgttctacctcagcctcccaagtagctgggattacaggcatgcgccaccacacctggctaattttgtattttcagtagagatggggtttctccatgttggtcaggctggtctcaaactcctgacctcaggtgatccgcctgctttggcctcccaaagtgctgggattacaggcatgaaccaccatgcccaggctttttttcttttttgacatggagtcttgctttgtagcccaggctggaacacagtggtgtgatctcggcttaccacaacctctgcctcccaggttcaagcgattctcttgcctcagcctcacgagtagctgagattacaggcacccaccaccacacccagctgacttttgtatttttagtagagatggggtttcaccatgttggccaggctggtctcgaactcctgacctcaagtgatctgcccaccttggcctctcaaactgctgggattacaggcatgagccaccatgcctggccattatttatcttataatccatattcaaatatctgcaattaccccccaaatgtcccttacagtctcttccccccagtccagagttcagtaaaggatcatgcatacatttgaaagctatgtcttgtcactgtcttttaatctagaagagtccctcatctcttttgtcctttcgggatattgacagttttggggtccgggccagttgtactgaataccctgacatctggatctgctttattgttttctcatgatttggttaggattaagcttttatggctagaatattaaacaggtgatggtgtgtctttcccattgcttcatatcagaaagaaataatgtaaatgtgtcccattattgatgatgctaagtttgatctgttggatcaaacttaatatgtcttcattggaaacatacattttggggttaataagtaatctgtggccttcaagactacgagactgtcttgttctccacccacctttcacccagtaatgtttgtgtttgtttgttttgagatgaagtctcgctctgttgcccaggctggagtgcagtggcgcaatctcggctcactgcaaccttctgttcttcttctcttgcctcagcctccctcccgagtagctgggactacaggcacgagccacttcacattgcaagttttgcttttttttttttttttttttttagtagagatggggtttcaccattttggccaggctggtctggaactcccaacctcaggtgatccacccgccttggcttccgaaagtactgggattacaggcgtgagccaccgcgcccagcccccacccagtagttttttttgttttgttttgggttttttttgtatttttagtagagacggggtttcaccatgttagccaggatggtctcgatctcctgacctcgtgatccacccaccttggcctcccaaagtgctaggattacaggtgtgagccaccacacctggccaacccagtagtttttatcatcccttgatgatccctccctggattatcatgctggtggttgcaaaattgtaactttctaattctaccattgcttcctcttttattaggtaatattcccccccaaaaggagctcccgccctttttctggggtatcactatggactcataaacttttttttattttatgtgttataatccattactatggttattctattttcccttggttttattagggtatcatttacataaaatgaaatgcatagatattaggtaatatgtaatctgatgaattttgacatatgtatatacttgtgtaaccaacacctgaatttaaccaatactcccaatggatatagaaatttccattactccagaaagttctcatgcacttgttacttactaactccaaaggagaaaaatgtacctctccactgttctaattttatcatcatagattaattttgactgttccataacttcctataaatggaaccatctaatatatagtcttttgtgtttagcttttttcactaaggatgatgttttctagattcatccatgttgatctgcatgtcagtggttcattcctttttactgctgggaagtgtaccgtctcaggaaatgatagtccagggccgggtgcagtgcctcacacctagaattccagcactttggaaagctgaggtacaagaatcgcttgaaaccaggagtctctacaaaaaattttaaaatgagctgggcttggtggcacacacttgtagttctagctacttgggaggctgaggtgagaggactgcttgagcccaggagttggggtctgtagtgagctatgatcccaccactgcactccaacctgggtgacagtgtgagaccctgtctctgaaaaaataaaaaagaagatgataccctaagataaaggcttcagaagcagctctctctgaccgtctcctgcccttctgtctctggcctcttattctcccctgaggctagtcatagaaactagaatccctcttccccaaggcagggtttagaaaccagaaactggcagggcgcagtggctcactcctgtaatcccagcactttgggaggtcgatgcaggcggatcacctgaggttaggagttcgagaccagcctggccaacatggtgaaaccccatctctactaaaaatacaaaattagccaggtgtggtggtacatgcctgtaatcccagatactctggagactgaggcaggagaatcgcttgaatgtgggaggcggaggttgcagtgagccaagattgtgacactgcactccagcctgggcactagagcaaaactccatctcaaaaaaaaaaaaaaaaaaaaaaagaaaccagaaaccttcctccttccccttgccagcggtgaaaccaaacctaaaaatattactctaactccctccccctaaaccaccacacctttctgtgcataaactggccatcaagaaattatccaacctacctggtttgactgtaggtcataagacccccattccagagagggtcctgctgcacacccggaaggaaggacaagaacaaaactctgtctcaaaaaaaaagaaaaaaaattctgtgtgtgtgtatttctcattctttttgatgctcaaattgtcccaaatttgaccattggtagtcctctcaaattaattcctgtgtcatctttgggacaatcttaattttaaatgggccctgtgggacttaaacttgtccaacactatgatcggttctgagttcagaaaatagtctctctaaatttttgttccaatctccacagatgtagattcttacctcattcccaaagctagtcactccttaatctacaacagccattcttcagcaacactgaagactcttatgacataaagttgaaacttctttccccaaatgatgcatgcatccgacacacaggcagacacacacgtgcatgcgcagacacacaggcagacacacacgtgtgcgtgcggacacacaggcagacacacgtgcatgcacacacacacacattttgccagtggttcttggattgtttacagtgatctctaaatcactgaacgcctactatgtattagagattgtgctagatgcaaagaaatgcaaagggaagaaaataagaaaattaacatttaaaaaagacctaggccccatgtggtggctcacacgtgaaatcccagcattttgggaggccaaggcaggagggtcacatgagcccaggagttggacacaagcctgggcaacatagtgagacctcatctttacaaatatatatatattttttaattagcctggcatggtggtgcatgcctgtggtcccagctagttgggaggctgaggtgggagaactgcttgagccctgggggccaaggctgcagtgagcagagattgcacagtccagcctgggcaacagaacgagaccccgtctcaaaaagaaaaagaaaatacctaccatgtatgttccggacattgtactaagtgtttgatacatgtcatcttaacaaagatgcataaaatagagatttcataaactaacaaattatcacagcacactagaatacatactattgtaaataaaggcatgtagtcactgaattacattcattcaccagatatttcttgaaaacttcctatgtacaagctctgccccaggcgtgggggatacatctgtgaataagacaaatgcagcctgtgccttctagggctcaagtctagtggaggaaggcagacacataagcaattaccatcagagctccaacccacacaaacatttttaaaaacatattattgtagagacaggttctcactatgttgcccaggcttgtctcaaactcctggcctccagcaatcccctcacctctgcctttcaaaacattgggattgcaggcgtgagccactgcatctaacccaaaaatatgtttcaaaaagaaaaacaaaatctaaaacccactgcctctgaatctgtactatattctttggaagctcctcacaggtgacaaattagcattgtcttatatacaacccaaagccctctgagcagagcttgatgaataagtggataattaatatcttttttttttttgagacagaatctcactctgtcgccaggctggagtgcagtggcatgatctcagctcgctgcaacctccaactccctggttcaagcgattctcctgcctcagcttcccgagtagctgggattacaggcgtgtgccaccatgccatgcccagctaatttttgtatttttggtagagacagggtttcaccatgttggtcaggatcacaagctcctgaccttgtgatccgcaggtgcagatagaaaagaaatcccagattgagtgttgtgctgtaatcctagaaaacaatcgatcaaatcagaacagactccatgaataaaaagaagagattccaaccagaaattaatgtcagaaatttgaaaagggaatatcatttcagattcttcagcaccaaaagatcataagaagacatgatgaataactttatgcctatgtatttgaaaatttaagtggaacagaaatatttctagaaaaaagtcttacctaaatggacacaaaacataatagaaaattggaatcatcctataactattaaagacatttcatctctaatttaaaaggttcccacaaagaaaactccaatccctaatgcctttgaaatctaccacacttttaaggaagaaataatgccaacatcacataatttcttccaaaggccaggaaaaaaggtcaccaaccgacatgaaagcaacataacattgacaccaacataggagataaggtgcaaaaatatctctaatttcatttcattcagttcaaaccgtgatacagtttgcctgtgtccccacccgaatctcattttgaattgtagttcccataatccccacatgttgtgggagggaccgggtgggaggtaattgaatcatgcgggcagttacccccatgctattctgatcatgagttagttctcacaaaatctgatgattttagaaggggcttttccccccattcgcgcttcacttcttgctgctgccaggtgaagaagaccttgtttgcttccccttccaccatgatcataagtttcctgaggcttccccagctatgcggaactgtgagtcaattaaacctctttcctttatcaattacccagttttgagtatgtctttattggcagcgtgagattggattaatacaaactgctttcattaataaaattgcatcaatttgttgcagcaatgttgggaacatctagtacccttgttctcagtcttgagcttgcattagaatcacctggaggggttggctttgttaaaccagattgggggcccatctgtggtcagggatggggcccaagagttttaaatacaacaagatccttggtaatgctgttgcctctgcaccagggaccacttttgacaatcactgacccagtggcacatactattttgaaatcttgcttgccatagaagtaatgttatttggaatgcttggacaggctcagtatgttggaacaacttctaatttaattctctaaggatgtaaaaaaaaaaatcttggttagattggccaacattgatatgattggccaatttcaatatgctaaagtaaatgatgtggtcagctgtaatccctgaaaatttgttttcaagaagttgattatcactgtttttcccccaacatatatatgaattttagcaggatccctttgttttcctaagatttacagcatataaaagagtattccaaatagcattgctttcagattcttctaacaattttataataactgtattatattttcattcatatttgctactctcatacaatgtctttatatttgtctggactaatctgtattggccaaagttacaattgtcaattctctgaatgcttttaatccagttttgtgagagaagattaaccaaacaagaagaccctccttaaaatgttcttaccactcatgtaagatataagctaagtgttgtgcaactttcaatttgactttctctggttggattacaaaatctatacgagattgtaacagcataataagcattgtttccaacattccgcaacagtatagattcaaggagaaactctattattgctaaggtatgtttttatggcttgctacaccataaaaactatacacaccaaaatacatgccagagaataaatgtttttttcaggaaccatgtgagcaatttttttcttttggcacataatatgcaacccaatacaatgataataaggctttctcactgacagtcacaacatgaatcataaaatttgcctatcacattatatatgtttttctttctttggaaatattcgagagactgactaattcaacatgtcatgtttccaagcatcttttaagttttgatggttttaagttctcatttgcaagaacatcattataatgcattggtgtacatgtcattttgttggttttacacatttcataaaataatacacacatatatgtatatatatatatagagagagacagagtttcataattatcacccagactagagactgtgatctcagctcactgcaacctccgcttcccgggttcaagtgattcttctgcctcagcctccagagtagctgggattacaggcgcctgccaccacacctggctaatttttgtatttttagtagagatggggttttgccatgttgggcaggctggtctcaaactcctgatctcaggtgatctgcctgccttggcctcccaaagtgctgggattacaggtgtgagctggctgggcatggtggctcatgcctgtaatcccagcactttgggaggctgagatgggaggattgctcaaggctaagggtttgagaccagcctagtcaacatagtgagacccccatctctattaaaataaataaataaatacataaataaagcaaatcttgcatttaccctttttaacaagatgcaaatgatgtcagtctgttgattagagttgatattttctccaatatttccatttactcttcccatgtttttcaccttattattcttgttctttgtagcattaaaacagtcaacttaagagcaatttgaactagttcaattaaaatgctacaattattgcacatccaaaattttttatctgattataaactttctgaaaaactgcactgcaaattcctaaccaaaactcagttgaaagtcatggcaatattgcaaaaaaaaaaaaaaaaaaaaaaaaattccactcttcaattcacaactaactacaaactattttgatataaaattaaataatacacagctgggtgtggtggctcacgcctgtaatcccagcactttgggaggccaaggcgggtggatcacgagatcatgagttcaagaccagcctggtcaagatggtgaaaccccatctctactaaaaatacaaaaattagccaggcgtggtggcaggtgcctgtaatcccaactactaggaaggctgaggcagagaattgcttgaacccgggaggcggaggttgcagtgagccgagatcgcaacaccacactccagcctgggcaacaagagcaaaactccatctcaaaaaaaaaaaataaataaataaataaatactatactattctgccattataacttgatggtcatattgacactcatgtaccagaaaatcaaatgagatgacaattcaccaaataaactgcttttagccaacgtgcacatttttcacatcccctcctctgtctctcccacaatgtaatgcaattagccttgtgcgattagtaatgtgctcctgtcctcagttcttgtcaagaatccacacaaggcactctaatattttcgaatccattctatttcattatttaaaaagttagtgggacacattaaatttatttcttgacccactaaagggtcatgagcaaagtctcaaaaacactactgtaagacactaaactattaactattgcaagggagtttgtaaaaaatacaataaacagaatagcttacctctctgcatgcagaatgttttctttgctaactttatttttcaaggctggatttataccacactgggcttgcaaacttgctgcttcatgggttggtggggaggggtaggagaggggtgtgtggggtatatatgttttcttttttattttatggtctttttaaaaaattgagatataattcatacaccataaaattcacactattaaagtacaattcagtggtttttagtatattcccaatattgtgtaactatcatcactatctaattccagaacatattaatcacccatcaaaaaaatccatacccatgaagagtaactccccattttccctgcccctggtccctgccaaccactaatttacttcctgtctccatagattaatctattctagatattttatataaaaggaatcacacagtatgtggccttttatgtctggcttcttccacttagcatatatttttaaaggtttatccacgttgcagcatttatcagtaggtcattccatttagtggtcaagtaatatgccattgtatgaatattccacattttaatcatttgtaagttgatgaatgctaggattgtttccacttttagctattatgaataatgctgttacaaactgacgtacaaacttttgtgtagacgtaattcattttagttttctcttgggtgagtggaattgctgggtcacatggtaacttaatctttaattttaattaatttatttataggctgaagtgcagtggcgtgaccttggctcactgcaacctccaccccccagattcaagcaattcttctgcctcagcctcccgagtagctgcaattacaggcgtgcgccaccatgcctggctaattttttgtatttttagtagagacggggtttcgccatgttggccaggctgggcaatgtttaatttttgataagccaataaagtgttttccaaaccagctaccccgttttatatccccgctagcaatggatgaaaattccagggctgggcgcggtggctcacgcctgtaatccagcactttgggaggctgaggcgggcagatcatttgagcgcagtagttcgagaccagcctgggcaacgtggcaaaaccctgtctctacaaaaaataaaaaattagccaggcgtggtggcatgcgcctgtggtcccagctacttgggaggctgaggtaggagtatcacttgagccccagaagtcgaggcttcagtgagctttgattgcggcactgcactccagcccgggcaacagagtgagaacctgtctcaaaaaataataaataaataaataaataaaaattttaaaaacaaaattccaaattctccacatcctcactaacatctcccacctcagcctccctaaaagctgtgactacaagtgcgagccaccatgctcagctaatttttttatttttggtagagacagggtttcgccatgttacccaggtcttaaactcctggactcaaactatccacccactttggcctcccaaagtgctgggattacaggcttaagccactgttcctggccttttttttttaaataaatgatttttaaaaatttttatattgacaaggctgggcgtggtggctcacgcctgtaatcccagcactttgggaggctgaggcaggcagatcacgaggtcaagagatcgagaccatcctggccaacatggtgaaaccccggctctactaaaaatacaaaacttagctgggcgtggtggcacatgcttgcaatcccagctactcgggaggctgaggcaggagaagcacttgaaccagggagtcggaggttgcaatgagccgggatcgcgccactgtactccagcctggcgacagagacttcgtctcaaaaaacaaacaaacaaacaaaaaaattacattgacaaataaaattagtatatatttatcaagtacatgttgttttgaaatatatatacattgtggaatggctaaattgaggtaattagcatatgtgattaactttagactttaaggatatgtactcgtcataatggtctctattagccaggaacctgacaggaaacagatggctcattcaaattagaaaaattagtggaaggtttaataaagagactacttacaaaggtgtggacagagtgttagagaaccgcaagggaaaatacagtaatcctatacagccaatcctatccctagcctgaagggaataagagaatggttactgtattagtcagaattacaaaacagaactaatggaatatgtttgtgtaaggagggcgaggtggcttacacctgtaatcccagcactttgggaggcggaggtgggtggatcacctgatgtcagaagttggaggccagcctgactaacatggtgaaacctcgtctctactaaatacaaaaaattagtcaggcatggtggcaggtgtctgttatcccagctacttgggaggctgaggcaggagaatcacttgaacccgggaggcagaggttgcagtgagccgagatggtgccactgcattccagcttgggcaacaagagtgaaactccatctcaaaaaaaaaaaaaaaaaaaagaatatgtgtgtgtatagaaagaggtttatcataaggaattggctcacacagttgcagagattggcaagtccaaatgtgcagtgtgggctggcaggtttgaaacccaggaaagccagtggtatagatgaagtcccagagcgggctgctggagaattccctctcatgtaagggagaggccgtctcttcattctcttcaggctccagctgattgaatgaggcccatccacattatgaagggtaatcttcaccaattaaaatgttcatctcatccaaaaacacccttgcagaaatactcagaataatgtttgaccaaatatcggagtacccagtggtccagccaggttgacacataaaattaaccaccacctgaaaataaaaagttgtgtagagatgggcaccttgggataaaatgatactttttttttattattgtactttaagttctagggtacacgtgcacaacgggcaggtttgttacatatgtatacgtgtgccatgttggtttgctgcacccattaactcatcatttacattaggtatttatcttaatgctatccctcccctatccccccaccccaccacaggccccggtgtgtgatgttccccgccctgtgtccaagtgttctcattgttcaattcccacctatgagtgagaacatgcagtgtttggttttctgtccttgcgataatttgctcagaatgatggtttccagcttcatccatgtccctacaaaggacatgaactcatcaaaaggatattctttttatatacatatatatagagataggatctcactatgttgcccaggctggtcttgaactcctgggctcaagcaatcctcccatctctgcctcccagagtgctgggattacaggtgtgagtcaccatgcccagtcagaaatgataccttttgattgagagatgtagccagcctgaagcaaatcctgcaagaagggagccagagggataaacgcccttgaactcactccactccctttcaccagtctcctgtctgggctccccactggatgaacccaactggaagccaggaagaatgagcccattaattgtagctcataccagaccacgagaacagaggataatgaatttcttggggcaaagaatagggtgaaaaagggtgaaaagcacatccacagggggaaatggaagatatcctacacacaagattatgccacagtaataagcaattccagcggactcaaagaaagtagaaggaaggaaataagatcaaagcagaaattagcacaacagacaaacatacacttgacagcaacaagtcagtcccaagtttgttcttcaaaaaagagaaatacaataagaaatatctggcaagactaatcaagaaaaagagaaggcatagataattaataataaaaaacaggccaggcatgatggctcacacctgtaatcccagcacttttggaggctaagtcaggaggatcatttggatgccaggagtttgagaccactctgggcaacatggcaaaaccctgcctccacacaaaaaatttttttaattagccaggtgtgatggtgcatacctggagttccagctacttggaaggctaaggcaggaggattgcttgagtgtgggaggtcaaggctgcggtgagtcgtgatcacaccactgcactccagcctgggcaacagagcgagatcttttctcaaaaaaaaaagaacaaaacagataggacaacttcatgccaatgaattcatagaaaagtacaactttctaagttagggaagagcagggtttaggaaaggactttctttcgtctctctgatctggcctggaatccggggtgttgactaatgatcaagggtatccctgggtgtggggatgagctggccttggccacaaagaagcctgaataatgaagtggactgtggttctaagagtagtcatagctaatagtagctgttagctagtagatgatgtaatttccttccattatgcctcagttttcagtcaagacttcttcaaagttatagcagttctcgtctaggttatggggaattatgtgtaggcctgagtctctatttgaggcaaagtaatagaagagagggcaggaggtatatccctgcctatcaaggtagccagaggtttgccatggtactgaagaaaatgatcagcagctgaattagccaaggttcatgggcaaagatgaggctggcagataaagccagacaaattcctggttaaaagtcacctcctgagctatttagagaaacagttgattcagggctgggataggaacgggatcagctgagcttggaacatcttgtaataccagaaagcaggacactatcaaagactattggggttgtgttaacaggactcagggctaacttgaagagaggcttccactggccagaaatgggacaatttgagctttgataagaaaaataatttcaatgaactgaaaaccatcaaatgagtttaaatccaagagttcacaatacttgaaaaacaaaacttcattgtcacaattggaagatgctaggaaaatgatgcattattctggaaaataaaaaataaaagttaagaatcaaatatttatcctggctttcctgaatgaactgtgccccaaggaacccaaatagttgacgagaggaagtctttctttagagaagtagtctagccttggctgggcatggtggctcacacctgtaatcccagcactttgggaggccaaggtaggtgtatcacctgaggtcaggaggtcgagaccagcctgactaacatggtgaaaccttgtctttactaaaaatacaaaattagctgggtgtggtggcgcatgcctgtaatcccagctacttaggaggctgaggcaggagaattgcttgaacccgggaggcagaggttgcggtgagccgagatcaagccattgcactccagcctgggcaacaagagcaaaacttcatctcaaaaaaaaaaaaaaaaaaaaaaaaaaagagaagtagtctagactaattaaaatctcactattttgaaacccctgttgaaataatggatccaagcaatgaccaacaaatggctgttagtaacaggcaaggagacatcatgtgtctcttgaccaaaagaaacaacagtgcttattcttgaaaaataaaaacaccagcctagacaacatagcgagaccccatctaaacaaaaaatttaaaaattagccaggtgtggtggtgtgggcctgtagtcccagctattcgggaggctgaggcgggagaatcacttgtgcccgtgaggctgcagtgaactgtgatcaccccactgggtgacagggtgagacgctgtctcaaaatacataaatacacaaataaaaataaaaacaaaagtaaaaatccaaatctgatgatgtctctagatcttaatatcaactttaaaaaacagttatataataaatacctcagagatgcaattaacaaaatccataatatggaaacctacaggacatacaactgttgtcttcaacaaacaaactgcaatgaaaatagaggaggagtgggaaaggagggagggagggagagggaaagaattcctgtaaattaaaagacatttcagagatatatcatctaatttcaaatatataaatcaaccctatgtgggtcctgatgcaaacaaactataatacaaagttatgaaacaaaacattttgaacattggagaggatatcaaggaataatgatttatttttataggcatgctttggggatgcattctgaaatacttttaggaataaaatgtttggaatcctaaataatctagtgtggatataaatgaaataaggttggccatgaattcatcatctttgaagctagtttgttgaaattgggtgatgagcacacaaaggatggatgtcctgttcgctccatttttgtttatttaaaattttacttagccaggcatggtggcatgcacctgtggtcccagcttcttgggacgctggggtgggatgaccgcttgagcctgggaggtggaggcttcagtgagctcagatcatgccactgcattccagccagggcatgagtgagatcctgtctccaaataaataagaaaataaataaaaataaaataaaataaaataaaataaaaataaaaaaataaaaaataaataaaataaaataaataaaaaataaaataaaaaaataaataataaaaataaaaaaataaacaaaataaaataaaatagtacatcctggccaggcacggtggctcatgcctcctagcactttgggaggccaaggcaggcagactgcttgagctcaggagtttgagaccaccctgagcaacgtggcaaaatcccatctcaacaaaaaatacaaaattaggaaaattagccaggcatggtggcatgctccagttgtcccagctactcgggaggctaaggtgggaagattgcttgagcccagaaggtcagggattgcaaggcttgcagggcttgcagtgagccgtgattgcgccactgcactccaggctgggcaacagggtgagaccctgtctcaaaaaaaaaaaaaacaactttgtggccagggacagtggctcatgcctgtaattccagtactttgggaggctgagatgggaggattgcttgagcccaggaattcgagaccaccctgggcaacaaagcaagatcccatctctaatgtttataaaaatgtaaaaagaaaaaattaaagttacaagaaaataaaattttaaaaagcaataaaattttacataattaaaagctcacgtcctcagggaggctttttccacccaccctatctaaagcagcttatctttccccattattttctagcacagccccgtgttttcttcatggaactgatcacaatgttactttatctatttactaggttatttctttctgctagaaatttagtttcacaagaataaaaactgtttgccttgtttgctgctgaacctctggggctgcggctggcacacaaaggtgcctgcccagccccatggctcacgcctgaaatcccagttaatcaggaggctgaggcaggggattgtttgagcccaggagtttgagatcagcctgggcaacatagggagacaccgtctctgcaaaaaaatttttaaaaatcaggcaaattatagtggtgtgtgcctgtggtcccagctactccagaggctgagatgggaggatcacttgagcctgggaggtcgaggctgcagtgagtcgtgatcatgccactacattccaacctgggtgacagagggagaccctgtctcaaaagaaaaaaggtgcttaataaatcttcgttgcttggaaggacaggtggatagataggtcaactaaagagtaagaagcagccggggcatggtggctcacgcccataatcccagcactttgggaggccgaggcgggtggatcacctgacgtcaggagttcgagaccagcctaggcaacatggtgaaacctcatctctactaaaaatacaaaaaataaaaataaaaataaaaaaattagccagatgcggtgtagccagatgcacgcctatagtcccagttactcaggaggctgaagctggagaattgcttgaacctgggaggcagaggttgtagtgagccgagatcacaccactgcactccagcctgggtgactgagtgagactctgtctcaaaaaaaaaaaaaaaaaaaaaaaagtaagaagcacatgttggagcaagaactaacaaagaaatacatttatgacaacactttccacaaagacaccagaaaaggaagggagattcaactatcgacccctaggatctttggagccagctaaccgcatttagccgtctctccagctgcatgagaaaattaactagagtcacaattgcccgtagccaccaatcctttctttgaatgaaatctcatgagacagcccaatatgtaaaacatgataaccaaaatatgatagccaaaagcaatttattatagtttagcctcaaaaaaataaaaataaaaaaattatccagtggttatgaggagtctaggaaaacctgtcccagtaatgccaacttggaggtgaagggctgactggggcagctgagaagtgggaccttctgtttggcaggcttcctctcccttgcctggtcatggttttctggtgagaagagtgttcctggccttgctggaggttcccatggccccgaactaacagtgtttttctgaaatttcgacctgctccgtttgagagagtagaattccctcatcaagtcctccacctcccactgctcttccttcagcctctggcagcagtgcagggcggcagggtcgatggggtgagcttctgtgttgaagatgtaccccccagcccccaggatgcactccccatagggggtgatcaccgcgtcgaaggtggacccattgttgtggatgaagttggttgggtcaaacaggaggtagaggtatttcacagtctcggccaggaagaacgactccatgcggttgtccagcttgtggtctcgcagatctttgatctgacatgtgggagaaggaagcaagctggaacaccatcacaatttagtagtaagggtcaggcaatcccttaagaaggcctgttctgccacaaagcagctgagggcctgtgagcaaatcactgaacttttcagaacttcactctttcccaagccaccatcatctctcacctggattatcacataagcttccaaatgggctcccagcttccaatcttagccctgcagtttatatacacacactattttaaaaaatagggacagggtctcacaccatgttgcccaggctggtctcaaatccctgggctcaagcaattcctcctaccttggcctcccaaagtgccaggataacaggcgtgagacacacaccaagctcctacagtatctgtataacataagtcttcctgtcaattctctactcacaactttctgtgagccctccatttcatgcaggataaaaatgcaagtcatgacctggcccctgctcccttcctgccctcacctcttaccactctaagagctccagctgctgcctttctgtcctgagctagcacagcaccctcctgcttcgggctctttgcatctgtggttctttcagcctggagcactccgcctccagtttttctcatagcttgttccctcccttccttcaggtctctgctcaaatgcttcctcaccagaaaggtctccgctaaccttgctctatgacatgacaatctcctatcccctttatcccaactttttgtgactataaacatagagctaatcgtcccttttaatgatggcagagtattccatcgtgaaaatggatcaccatttacttggctaatcctccttggaagggcattcagatgattaccaagtttttttttttttagagatggagtttcactctgttgcccaggctggagtgcaatggcatggtctcggctcactgcaacctctgcctcccgggttcaagcaattctcctgcctcagcctccagagtagctgggactacaggcacatgccaccacacccaggtaattttttttgtatttttagtagagacagggtttcaccatgttggtcaggctggtcttgaactcctgacctcgtgatccgcctgccttggcctcccaaagtgccgggattacaagcctgagccactgcgcttggccaattaccaagtttttgtaagcaactaataaggggtctttttttctccactcagacccaaagtatcgacacttactaggttcaactgctgttgatgaaaactattgacattgttttagtaaggagtcttatttagagaatttcaactgagttttcaggcatggatgactaagattacttgctacaaacatttattttagcttctcagaattagtaatacttctaaacaaaacattctcagtggactctatcttacatttaaaaatatgactcaaatatggtcttgatgtatcaagatgattatttccttgccctgtttgagaaaggtcagacccctgttcccatcattcaccatggaagacctccaaagggcttcatgttcatggaaatgagcccagcattcctaggaaggccccagtgggcttatcattttggtttttcacacaatacagcatattagaaaccaaatcatatcaggggtttattttttcccttccacatgtaggtcttctctcttcccctacacatatctatattttacttatagaatataatcacattacaaacttttgcaaaataagtgttttgttgttgttttgaattccataccccaacactgtaggcttttcaggggattttcttccagactattttcttctactttcatatttatatcttgcctgcttggttcctgcatggatgtgagatggctctcacctttgaccctttcaatctattcttcacaaagcagccaaagcgatctttctaaaatacaaatcagatcatgtcactgctctgctgtaaatcctaccaagggttcacattccaagtagaaaaaaaaacccaaactctttcctgtggcttacacaaaaccctacatgatctagcccctgcctacctctgggaccttatctcttcccacttttctccttgcttgctccgctccagccacactggccttctgtctaccagatacacattcatggtttttttctcattaaaatgtaagctccatgagagcaaggccactgctgtaacccttgggcctagcagagtgcctggcatgtgaaagacattcaagaaatatctgtgagactaagcaggactgctttgttaaggagtcccaggtttgaatatagggctatgggactctggattccccttaaaatctattttagtgtctcacaaaacttttcgctaaactcaccttttcaaagtcacctattcaaacagatcaaagatctccactgtgggaggaatgccaagggccggggtcaagatcccaaggaactaattctagctctacctctactagctgtgagatctttagcaaggcacttagcttctctgttctttggtctccccatctgtaaaatatgagcattatgtatatctccaaggtcccttctagtgctgatatgtcagaactcccaaagctctacccttaaagaggctttttagcagcaaggggagactcttcccagttcttggggccatgcaaacacttactgttgcaaatccgcactccaccttgctgattttttcaatggattccacagcatctcttccgagttctaggagggtgggatcccccgtggcacggtagaggtacattgcgctttcaataagttctgcaaagtccaaagcagaccctcctcactcagtggctgcacagagatggcctggggcctcttagggccgtgagggactactcccctccatatcttgtccataaggccccaactagcaggaacacaggatacctcacccagtgctgagtttcagagccagtatacccaaagcttgaagctcagtggagaccagcattaaggctgaccagtgacttccaccacaagggagagaaaggtggccaggttctggcatagagaaggtggcggaggttgttgcctaattcccaatatctgttccccgcttcctccttagtagcaggattcctaactttagctaagcacaggctgcctggctgccaacactaactattctaacagctaggtgggattaaggacaccatggcgagccatataagcccagaacatgagagagaaatacatttctatcctaattaagctactattttttttcctgtcactcagagtctaacctaattctaaaactcaaaagaagagtaagagcttggcatcataaggctcgttctaagataggatggaccaaaagaaaaggctgagatatccaagagcaggccaggcatggtgggtggctcatgcctgtaatcccagcactttgggaggccaaggtgagaggatcgtttgaacccaggagtttgagaccagcctgggcaacatggcgagatcttgtctctacaaaaattaaaaatgattagctgggtgtggcatgcacctgtagtcctagctactcaggaggctgaggtaggaggatcacttgagcccaggagtttgaggctgcagtgagccatgattaagccactgcggcactccagcctggatgacaagagtgagaccttatctcaaaaaataaaaattaaaaaaataaaataaaataaaccaccaaaccgtcaatctaacaaagacgtagtcatcagttcactgtggccagaaaaagtgatgttttgtcttgcccaattctatgccacaactggaacttgatgttaagacatgagctctaccttaagatgaatattagccaacaggagtgggtccagatgagaatatttattctagagataaggaaatccaaaaaaaatgtgtttattgctttcaaatacctgaagaactgttgtagagttgacttcaagggtggcctcagctcagtatgtttttctacttcatccatcttttctaagagacagaagaacccctgtctcctttctataccatcatctccccctgaccttctcctgtcctgtttcctcctgggcttgatcagtgcttctgtcccttttggcttattgctgcaaactctggttcttattttattccgttaattacttttttgtgacagagtctcactctgtcacccaggctggagtgccatggtgcgatctccgctcactgcaactctgcctcctgggttcaagggattctcatgcctcaacctcccaagtagctggaattacaggcatgcgccaccagccctgactaatttttgtatttttagtggagacagggtttcgccatgttggccaggctggtctcaaactcctgacctcaagtcatccgccagtcttggcttcctgaagtgttgagataacaggcgtgagtcactgcacccagcctctagttcttattttagagaaaaggtctctgcctatctccccagttctctcttacttcctcctcccctctcctcacaggcctctagacaattgctaatctaattgctcatattctaaggcacagactagggtacattcattactagatgaacacattctgtgtgttcaaaggcagaaaagacagtgccctcatgggaggcctcctcttctgcttcttttttcggcttcttcttttttttttttttttttttttgagagggagttttgctgtgttacccaggctagagtgcaatggcatgatcttggctcactgcaacctctgcctcccaggttcaagcaattctcctgtctcagcctcctgagtagctgggactacaggcacatgccaccgtgcccggctaatttttgtatttttagtagagacagggtttcgccatattggtcaggctggtctcgaactcctgacctcagttgatccaccgccttggcctcccaaagtgctgggattacaggcgtgagccaccacacccagccctcttctgcttctagcagctggtgggccagtgccctcatgaccagccatcacgcttctctcctcacatgtgggcctcctaagcatgttagttattgctttactttcctgtgcatctgaccaactctgtcgagcagtggtccccaaccgttttggcaccagggaccagtttcatggaagacaatttttccatgaactgggcttgtaggagatggttttgggataattcatgtgcattacatttattgtgcactttatttatattattattacattgtaatatataatgaaataattatacaatccaccataatgtagagtcagtgggagccctgagtttgttttcctgcaactagacagccctatctggggttgatggatgacagtgacagatcatcaggcatcagcttctcctaaggagcacacaacctagatccctcacatatgcagttcacaatagggtttgtgctcctatgaacgtctaatgccaccacggataagacaagaggcggagctcaggcagcaatgtgagcgatgaggagcagctataaatatagatgaagctttgcttgctcacacgcagctcacctcctgctgtgtggcctggtttctaacaggccatggacttgtaccggtccacggcctgggggttggggaatccctgctctagaggaaggagacagcccaaagttcagatttggacttagaggaaggtaaaagcctgcagaggcctttaggctaggctctgtgctccaacactgctgatcagagagacatatacgaaagtacagggctctggccaatttagtgaaagagtagtccttatctcctatttgccattgttttggggtaggagggatgactggattaacgcactcctggattcctgacagcggtgccttatgttttttttttttggagacagggtctcactccattgcccaggctggattgcagtggcgccatcatggctcactgcagctacgaccacctgggctcaagtgatcctcccaggtagctgggatgggactacaggcatgcaacaccactcttggctaatttatttatatttcttatagagacaaggtcttgctatgttgcccaggctgatcttgaacccctgggcttaaatgatcctcctgcctcaggcttccagagtgctgggattacaggcataagccactgcatctggccagtagtgtcttactttccatgaatgccttcctgccagcctgtcccaaatggaacaggttgcctctgttaagtagcaagctccttgtcactcgtggtaactaagcaaaaactagataaccacttgacagggccatattaggaaaattccaattagaacacctctcaggttccctctaaccctaagattgtgcaagcctatgtcttacatttagttccaaaccctaatctttacctgttggtaacaccagatacgataccttctcagagcttcttatttttaaaatttacttatttatttttttgagatggagttttgctcttttttgcccaggctggagtgcaatggcgtgatctcagctcactgcaacttctacctcccgggttcaagcgattctactgtctcagcctccccagtagctgagattacaggtgcacgccaccatgcccagctaattttgtatttttagtagagatggggtttcaccatgttggccaggctggtctcaaactcctgacttcaggtgatccacctgccttggcctcccaaagtgctgggattacaggcgtgagccaccatgcccaaccaagtttcctgttttaaaaacatgccatgagaacaaatgcatgagaaacatcaataacagtggcctctaaggagtcaaaagttgatgaatttgctctttattccctctcctggtcccctctacacctcctacgataatcacttgagttagaagaggaaggaaatggggtagaggaaggcaggataaccagaaggcctgtcccatggctaaaaggcaattcaggtgggaaagtgggaagtgtctaagacaatgggctcatagcctgttttggggtgggggatgactatgtgtgctgactaagcttccttcctttgtccctctttttctttccctcctcacaattttcagcttccctgaagtgaatcaaatgacattagggctagaaaggaacctatgagagtgtctcaaatatagtcctttgcttgattctgagctgcaaatggggaggtggaagagactaggtaattcctaaggtccgccccaaagttctaacattccatacacgtaagcataatttatctgacccatggacttaggaagcttgcctacacttctgaaatcctgatggcaggagctcaaaaggagtcaaccttggccttttccttctcactcatttcctgatttgaaagagcatatggggccagtcgcagtggctcacatctgtaatcccagcactttgggaggccaaggtgggcggatcacctgaggctgggagttcaagaccagcctgaccaacatggagaaactccatctctactaaaaatacaaaattagctgggcatggtggctcatgcctgtaatcccagctactcgggaggctgaggcaggagaatcgcttgaacccaggaggcggaggttgcggtgagccgagatcacaccattgcacttcagtctgggcaacaatagcgaaactccatctcaaaaaaataaaaataaaaaagagcatgcaatttagttaggagccctgggttccaggcctagctcctgcacttaagagccagaggcgagccatttcatcccactaggcctcagtttccatatctgaaaacatggggataattaactcctagtaagaaaaccacccagagccactgaaaggaacagatggaaagaaatgaacttgtgggcagttgtggaggatggagccttgtagaggggatttggggtttcagcaaccagagcctgtgggcagatgacaagccagaaatgctgctcacctggccgaagtgggtagccctctcgcttctccactgtgtatccctgaggaatgttgtagaattccgggagccccccaaactgcttccatacagtgtagtagttgaggaaggtcctcatggcattgtcaatgtctccaatgaggctctgtgggagaaagtggctgtcaggcaggtagacaccaggcataaaaccccacagacaaccttaagaaaagacaaagtaaaatctgtggggccaaaaaggccttgaatcaatccctgagtctgccagttactcagtgtggtgctgagccaggcactggacttctctgagccccatctataaaacgtaaaatacaccacctatctcatgcattgttggaaggaacaaagattgtatattaagtccctaaatcttcagagtcaatgtcagctaacagttttggaattcggccagccagttaaaaattctaagaatagagaaaagtttgtgctaaggctcactcccacaccacacccccaaaagataaccatttttgtttttgtttttgagacagggtctcgctctgtcacctaggctggagtgcagtggcacaatcacggttcattacagccttgacctcctgggctcaagagatcctctcacctcagcctcccagtgctaatttttttattttctgtagagatgggggtctcactttgttgcccaggctggtcttaatctcctgggctcaagtgatcctcctacctcagccttccaaagtgctgggattacaaccatcacccatcttgcctggcctcagataaacattactggtttcttgtataacctttcagagtttctttatgcatgagtatatgttattttccccacactaaaaaatagcctttggttctttattaatagggatattaattatctccatatttttagatatggaaatttggctttcagatatttttatttgaattggttccaacaactaatgtggcaataaataattctgtatatatgtcacatcaaatagatgtaaaatgttatgtgtaagatacattttcagaattaggatcactgggtcaaaggatatatgcatttataattttaccactattgctaagtagccattactattaatgtaatctcacagggaagcagctgaccctgacatcttcattggatgtctcatggacagaacaaacttggcacttcctaaacaaaattcttggttcccttactttcccacgaaattgcctccctactttggcctttttcccttcttggtaaatgacacaatgtctacctggttattctggatagaaacccggtggccactttttttttttttttttgagacagggtctcactctgtcacccaggctgcaatggcatgatcatggctcactgcagccttgatcttctgggttcaagcaatccttccactgcagtctcctgagtagctgggactacaggcatgtgccaccaccctaggctaattttttatttttatttttatttatttatttttatttttttgagacggagtcttgctctgtcatccaggctggagtgcagtggcgcaatctcagctcactgcaagctccgcctcccaggttcatgccattctcctgcctcagcctcccgagtagctgggactacaggcgcccaccaccacgcccagctaattttttgtatttttagtagagatggggtttcaccgtgttagccaggatggtctcaatctcctaaccttgtgatccgcctgcctcggcctgccaaagcgctgggattataggcctgagccaccgcgcccgacctaattttttattttttgtagagatgaggtctcactatgttgcccaggtgggactactttttcttaaaacttttaaaaacgtagattataaaaacattttggtacatgcactattttggaacaccaaagtggggtagattagataagctctaagatccttccagctgcaactctaccagaccatgtaatggaaaaacaacgagatggcacagcggcacaagctgcttcctgcccttcctgaggcccactgtcaagaatgagattggacagaaacgcccagtggagaaacacctgttgccaatggccattcctgcccagactggaaatgcactgtcgactttaagtactgtaacactccatggcaaactggaagctcagttcctgacactcaatttggcagaactctaaatctatctaattcactctaggtctctcttccatcctcaacctgtccctccaaaaaaagtactcaagcaattaacaaagtacattatttgacttatacatcagaatgagcttgctttgccagactcatagaaagatgatcacattctttgatcattcctacctgaagaccaggccagtaggcctccaaggactggaagactggcatggacacagtccccttgtacatctgaacccacaggtaccagtcatcgaagcgggtgtagttccggatggctttgttatactctgcagtgggggagatgggataatggacatatgagtgattagggagaaaaaaggcaggcctggacagcggaagcgagaacttacactttggaaagagcaccaggatgcaatgaggcaaggaggctagacaagagcatggattctggagtcaaacttccagctcaaattccagctccagctctaccacttgctaaccgtgacctggggtgggtttttcccttttaagcctcagccttatgatctataaaatggggaggccaggcgtggtggctcacatctataatcccagcactttgggaggccgaggtgggcggatcacctgagattgggagttcgagaccagcctgaccaacacggagaaaccctgtctctactaaaaatacaaaattagccaggtgtggtggtgcatgcctgtaatctcagctacttgggaggctgaggaaggagaattgcttgaacccaggaggcggaggttgctgtgagctgagatcgcaccattgcactccagcctgggcaacaagagtgaaactccatctcaaaaagaaaaaagcagaaaataattgatgtggtttggctgtgtccccacctaaatctcaccttgaattgtagctcccatatttctcacgtgttgtggaagggacctggtgggagataattgaatcatgggggccgtttcccccatactgttctcatggtagtgaataagtctcacaagatctgatggttttataagaggtttcccctttcacttggctctcattctctcttgcctgcaccatgtaagatgtgcctttcgccttccgccacgattgtgaggcctccccagccatgtggaactgtgagtccattaaacctctttttctttataaattacccagtcttgagtacgtctttatcagcagtgaaaatggtctaatacagtaatgttaggtatctgtggaatttttcagtcatttatttataccacaaacattcgctaagcacctactaggttccaggctcctatgagtttgtaaacaagacaaaatccagccttcagagaacttacattctagtaggaacttgaatttatccctcatatctctcccctagattgtaaatccatgaggcctgggactttgttttgtctactgcagaatcccccacactagtacaatgagcaataaacattttctgaatgaacaaagtaccaaatatacatgcaaataaataagataatctcaaacaggagttgtaaggattatatgaaacagtccatgttcagagcttggcacaatgcttggtacatccgtggtattcaataaatatttgttgaataaatgagtaaagtagtccccccttatgtgaggagaatacgttccaagaccctcagtggatgtctgaaaccatggatagtactaaataaactctatatacagtcatgtgccatataacaacatgttggtcaacactgaactgtagagatggtggtcctataaaattataatagaggtgaaaaatcaccacagcctaaagatatcacagctgttgtaattttataatgcaatgcattacttacttgtttgtggtgatactggtgtaaacacacctactgtgctgccagtcataaaagtataacacatacaattatgtatagtacgtgatatttaataaacaaccatttacgcgtttatgtatttactatattattatcattagataactccttcctcttatataaaaaaagtcggctgggcgtggtggctcacacctgtaatcccagcactttgggagggcgaggtgggcggatcacgaggtcagtgttagaccatcctgcctaacacggtgaaaccccatctctactaaaaatacaaaaaaattagctgggtgtggtggcgggcgcctgtaatcccagctactcgggaggctgaggcaggagaatggcgtgaatccgggaggtggagtttgtagtgagcggagatcacaccactgcactccagcctgggcaacagagcaagactctgtctccaaaaaaaataaaaacaaaaacaaaaattagctgggcgtagtggtgggtgcctataatcccagctgctcaggaggctaagacaggaaaatcacaggagaattgaacctgggaggcggaggttgcagtgagccgagatggtgccactgcactccagcctgggcaacataagcaaaactctgtctaaaaaaaaaaaaaaaatgaaacagcttcaggcaggtccttcaaggaattccagaaggcattgttatcaatcatctgagataacaacagttctgtgagtgttactgcccccaaagaccttctagcaggataacatggggaagtggaagacagtgatattgatgatactgaccctaggcctaggctaatgtgtgtttgtagcttagtttttaacaaaaaagtctaaaaggtgaaaacaaaataaaaaactaaaaacagaaaaaaacttagagaataaggatataaataaaatatttctgtatagctgtacaatgtgttttaagctaagcattattacaaatgagtcaaaaagttttttaaaattttaaagttcataaagtaaaaaagttacagtaagctaacgttaatttattattggaggccaggcatggtggctcacgcctctaatcccagcactttgggaggccaaggtgggtggagatcacctgagatcaggagtttgagaccagcctggccaacatggtgaaaacccatccatctctactaaaaatacaaaaattaggccaggcacggtggctcacgcctgtaatcctagcactttgggaggccgaggcgggtggattgcctgagctcaggagttcaagaccagcccgggcaacacagtgaaaccccatctctactaaaatacaaaaaattagctgggcatggcagcgtgcacctgtaatcccagctactcgggaggctgaggaaggagaattgctagaacccgggaggcagaggttgcagcgagccgatattgcaccactgtactccagcctgggcaacagagtgagactctgtctttaaagaaaaaaaaaatcagccaggcatggtggtgggcgcctgtaatcccagctactcaggaggctgaggcaggagaatcacttgaactggggaagcagaggttgcagtaaaccaagatcatgccactgcactccagcctgggcaacagagcaagactctatctcaaaaaaaaaaaaaaaatttattactggagaaagaaaaaaaaatttaaataaatttagtatagcctaagtgtacagtatttataaagtttacaatagtgtaatgtcctagaccttgacattcactcaccactcactgactcacccagagcaacttcctgtcctgtgaacttcattcatgtgcccttttatactgtatttgtactgtactttttctatgtttatatacatacttaccattctattacaattgtctatagtattcagtagagtaacatgctgtacaggtttgtagcctaggagcaataggctacaccatatagcctaggtgtgtagttggctataccatctaggtttgcttaagtacaccctatgatgtttgcacaatgatgaaatcacctaacgatgcaattctcagactatatccctgtcattaagcaatgcgtgactactgttttcctatacatacacatctatgagaattcttaattcattaaatttttaaaaatttttatttttgagacagggtcttactctgtcacccaggctgaaatgcagtggtatgatcacggttcactgcacccttgacctcccagggtcaagcaatccttcaccttggcctcccaagtagtggggactacaggcacgcaccatcatgcccagcaaatttttttttattttttgtagagacgaggtctcaccatgttgcccaggctgatcttgaacttctggggtcaagcaattctctcgcctcagcttcccaaagcactgggattaaaggcatgagccactgtgcctagccgaaaaagtttaatttataaattaggcatgggaagagattaacaacaataactaataataaagcagaacaagtataacaatatatgttatagaagttatgtgaatttgtctttttggtaagagacaggaaaaaaagaaattatgtaaatttagtgcctcaaaatatctttgtttttttagagagggggtcttactatattgcccaggctggtctcaaactcctggcctcaaacaatcctcacttccaaaaaactgggactacaggcgtgagccactgcacccagcctcaaaatatcgtatctgactgtactcacctattttcagactgcagttgaccatggataactgaaaccatggaaatcaaaactgtggataacgggggactactgtagctataataataatagtaattaggtgctcaacaattcctcaagattgctagtgtctaagggcctggcgggtaagatgtatttattcaacaggtattaatctattacctaccacatgtaaagcactgtggggaacataagatgagtaaggcatggattctgcattcaatttgtagagctgtaactgttgatgagagctaactgcaagaaagatgctgaaggtcccaaattctgtagaaggatcaagctacttcctgggcaaggcgacatttaagttaggctttgaagggtgaaaagaatttggacataggaagacaggaaaaaagacattctaggcaaagaagatgccatgtgcaatggccaggagataagaaatccagggctacatacacagaatgcagcacgcttcagttggcttttgcaagaaggcatcaagtgctgtagtgggcatgaagtgggcagtgtaagtccatagtgactctgaattcagaactgattctgcaggcactcaggccaggcgtggtggctcacacctgtgatcccaacactttgggaggccaaggcgggcagatcacctgaggtccggagtttgagaccagcctggccaacatggtgaaaccccgtttctactaaaaatacaaaaattagctggatgtgatggtgtgcgcctgtagtccacaccatcacatgcccagctactcaggaggctgaggcatgagaatcacttgaacctgggaggcagaggttgcagtgagcctagattgtgccactgcactccagcctgggagatggagcaagactctgtctcaaaaaaaagtttttaaacaaatcacacatcagcaagaaaaatgaggggaaaagctcccttactctgccatttttacctaggaacatggccatgagcttcttatcctgaagcaggatggctcctttcaccaagtactcaaagtaggagtccacgccagccccgatgcctgcgtcctgggccacccacttgccagtgagcacatcaatgtggttgccgacctgagagagagaaagacacacggtcccaacgggaaggccgatggccaaagaaggatctactcacccccaaccctgactgcccagggagatgcagggcaggtgccccagtgcttcttgggaaacatgcagaccctgagagggaagggcaatgctggatcatggccagccttcctgtacatctgcatagtagagatgcatctcatgcacatttatgaggacttaattatacacattgagcaaaaaatgaaaaagaaaaatgatttggagtgtttatgtcctgcctagagtgagtgtgagatgggagatgagaatttgctgttgccgcaatctgtctgatttctcagcacccagcatgtgattccactatctgaagacacagacgtgctttacgtatttccataaattaactcaataagaacatccaccaagaagctgacagagtggttctaaggagagaaaccgaatagctggagacaggggcaaaaggggacttcaccaatgtcactgagtacccttttttgtatcctttgacttttttttttttaattgttcagtctctgtagagactgtgaaaaattggcaatgccggccaggcgcggtggctcatgcctataatcccagcacgttgggaggctgaggggggcaaaatcactggaggtcagaagtccgagaccaacttggccaacatggtaaaaccctgtctctaataaaaacacaaaaattagccaggcatggtggtgtgtgcctataatcccagctactcaggaggcagaggcatgagaatcacttgaacccaagagggggaggttgcagtgagccgagatcgtgccactgcactccagcctgggcgacagggggagactctgtctcaaaaaaataaacaaagatacgtatttttctattttattgtatttattttattttttgtatttttagtagagacatggtttctccctgttggtcaggctggtctcgaactcccgacctcaggtgatacgcctgccttggcctcccaaagtgctgggattacaggcgtgagccactgcgcccagccaaatatatgtatttttcatatggcttagaccctcatggaagctggtaacttcatctggtactcaaagaaatagctaactgttccgcgttggtttgtgtccccccaggagcacaacctcattctgcctgaaagtagttgatttggaaggtaagtccttgtaaacaccagtagaggagggggaagtgaggcagggcaagggaggcggcatttaaggggtatgccatcaggcaggtttccaccatgggaactggagttcaatcttgctggggagcttaggaattcagtgtagagctccagcttcggagtgatcccacccaaggggcagggaactggaatgtttatccaccaactcccatcagtatcagttaccggcttgagagctactcatgggtagcattaaatcctggtaccctcagccaaaggcaagcagagtggctccaggcaccagaggagacccacaggcaaagaggcgcaggtgatggcagttggaagactggccagtgtgcatggaaatgttaagagttgagaggatatgggcatggcaccaacagagtctactacggtcccactgctggagcaaaacctgcctgagatggactaagggatttactacaggtctccagcggggcaccttttttttttttttgagatggagtttcgctcttgttgcccaggctggaatgcaatggcgcgatctcggctcatcccaacctccacctcccaggttcaggcaattctcctgcctcagcctcccaagtagctgggattacaggcatgcaccaccacgcccggctaattttgtattttttagtagagatggggtttctccatgttggtcaggctggtctcgaactcccaatctcaggtgatccgcccgcctcagtctcccaaagtgctggaattacaggcgtgagccaccgcacccagccttaggggggcaccttcttaagggattttcggggagtcctcacacaagctttacttttcaagctggattagcaccagactgcataaaatgtgcctagacctaaatgcagtcttcctaagtcagagtgactcagcaaagttggtattaatatattaacgttactgctgaagtaactgaggaccagagaggttgagtgacttgctcagggtcacacagtttcgatgtagcaaggccagggcttgaatccagttctgactaaatccagtgttatgtcctggatggctttggctcaattactgttaatcttattgattatcccatttagaagctgaaactgaccttagagatcatctggtccaaagtgtgttcaatttccatgggttaatagtactggaagataaagggaagctctggtgttaaataagtttgggaaatgttaaattaaacaaagttgaatagatttctttactagaggatttttattctgctcatgtgcattctgactctccaaaaaagggggggatattatatctaatattcccctaacttaattggccaagactcattttttcatgcaactgccactcagtatctctcagaaccggtgtcctaagaaacacagcaaatacagatagacgctaaaaatgaaggccggacgagctgatgatctgaagccgtcaagtgagtcaggggcatgaaacatacgaccctcttcctagaaatcagagaatctcaactggtcaaagctgaatgcagcccctgctgcctgccagaaacgtgctttcccactctcctccccactccaagccaaacttgaattggaggcttggtctatttttggtgtcctgagcccaaatcctggaccactcccaaggtcaccctaagttttccttggcttgactgcaacttattgctcagagccctgggcctcgtaagcagggactcaaacaggaagggcagcagcgaacctaccagcccgatatctgaccggctctcccagaggcgcatcaaagccactctggccacatcttcgaacaccgggtcaccagtgaggctgctcagggtggcaaattcaacaatgaaggtcccaatccctgccgtacaggtgacaggggtctctcctgggttcacgccatgaagtaagttcactgttccatatggcatgccagtgggggtctgaaaggctgaacaatcgacaaattatgatcccggacaggagcagggggatagggatagttctgatacacgcccaaagcctgggaccttagccagcacttccctctttctcctgggtatcctgctagagtctgagccagagaaagataaatgtcataactggagggccctgagcagccacccagcccagatgctgtcaaacactgctctgcataaccttgggttcctgctcatcatgagggggcagggagcaggctgtgctccacacacactcgctttagctagagagctttacctatttttatttattttacactacgccttcaaagcccaggcaggtaacttattgtgatgcaggcagggtttaagccacagaaagtggtggggcttgtggcacaatgacaagagtaagccccgttcaaagccattcatagacttttggctcacgcctataatcccagcactctgggtggccaaggcaggcagatcacttgaggccaggagttcgagaccagcctggccaacatggtgaaaccctatttctactaaaaatacaaaaattaggcaagcgtggtggtgcacgcctgtaattctggctatctgggagactgaggcacgagaatcgtttgaacccaagaggcgtgggctgcagtgagctgagattgcaccactgcactccagcctgggtgacagagcgagaccctgtctcaaaataataataataataaacaaagccattcatagactttaaataaagatctctgctttaaataaagagtataggggctaaattatttttaaagggaagcaaaataggatataaaccactaaaccacggatatagtatgaccctcgatttataggtagggaaaaccatgcctgtaaagaagtaattcagccacaggtcacacagagagagtcaaacagagctgggatgggaacgcctcccctgtgcccaccccagccccagtccagttctctgcccgccccacccaagtggcacccaagtgccttctggttcaagacgagaactggacaaccagccagaggcagagatttcctctctgggcctaaaggtcaaacaactccagagcagcctatgcgtcaccaaactgtgaacaaaggtgtcgacacttccaagaaccacagggtctagcaactgtgtctgccacagacaagaaacttgcaatctggcaggcaccagcgggagagcaagtcacaaccaggaagggctctaagcaatatttcagaaaaagtcaggctgtaataaaaagaagaggagtgacaaaatcctgtttcttgacctttttttataaaatgaccaatgaccaaaaataattaaattataaaggaggagcagctaggcagagtttccagagtttcctccagggatgaatcacacaggacacaatgtctgcaaggagacgctcaagccatgagccatgagccatgagtgagacctgaacctagctcacccgctatcctcagctctcccccaaaggagaggcaagtgctatgtgagaaggataaagaggccgggtgtggtggctcacgcctgtaatcccaacactttgggagtccaaggcagatggatcacttgatcccgggagttcaagaccagcctgggcaacatggtgaaaccccatctctacaaaaaaaaatttagccatgcatggtggcatctgcctgtaatcccagctactcaggaggctgaggtgggagaatcaactgagcccagaagttcgagaggctgcagtgagccatgatcacgccactgcactccagcctgggcgacagagcaagaccctgtctgaaaaaaaaaaaaaaaaaaaaattaagaaagaaaagggataaataagtgagatggccaagaggtgatggaaagcacagtgtgacgtgtctgggtgtgaacagtcctcagagcctccaccacaccctgaagggaacacagtgtacagttgatgctactgagcctggtgttactgccccactagacaaaaacatggaggcttgacctgcagccctggacacagcttagccacaaaacaaatccctctcgttttaaaagtgttggacgttctctaagcagtttctccttcctgacctcattttagcctctccaaaacccgatgtggtagggaagtagaaattatgattctcatttgatagatggggaaaccaaactgtggagagaggccagacacagtggctcatgcctgtaatcccagcactttgggaggccgaggcagccagatcacttgaggtcaagagtttgagaccagcctgatcaacgtggcgaaacttcatctctactaaaaaatacaaaaattagctgggcatggtggcaggcgcctgtaatcccagctactcaagaggctgaagcaaaagaattgcttgaacccaggaggcggtggttacagtgacttgagattgtgccactgcactccagcctgggcgacagaacaagactccatcacaaacaaacaaacaacaaactatgaagagaaagagtggcttggtcacgatgttggctggcagagctgagtctagaatccagggctgctaatgctcacaccaacacccttccctgggcccctgttactccagcagtgtgtggaataactgtagtacctggaaggggacaaatgggctcattcaaaataagggtaatggccttccacccaccaggctggccaccttcaaccatcccctgcaaacaataatgaggtcaactcatccatccgggtcagggccccagcaggcccttaaaatgcccaggacactcctgatttccatggtgggtgcctggtgggtagaaagaccaaatacacctggtgagaaataccaggaattaattcagcactgccactctcatcttcagcaagggaagcaggacctactggacttcgtctctgccccatctctgtgtgggtcttacctgggaggagttttcgggccgcctcctcagccattctcaggagaggcccggaacagggccatccagcctctacttccaccccagccttcttggagagcagatgagcagacaggagtcctcctaccactacagatggcacagaaagcaaatggcacagtccaaagggaaagaccaagggatcaaggatctttcccctgtgcgagttaaacataaacactctattgtggggcgcatgttctcaggacctcctgaagctatttcacgggtaaaaacaaacaaacaaaaacctcactctgttggggtggctcactgggaaggagctagagccacccagcgaaaaaagagtcccttaatcccacatatttctatggtgttaagtttatggggttttcttctcttggttcatcacaggaacagtggctattttttgtaagtccctattgtgtaccaagcactaagtactactgtcccctcttcgtatgaagatactgaggttccatgagataaagtgacttgccccaggtcacccatctagtaggtggtagggctgagtatctttgattccaaagcccatgctcattccatttgtcactctgtctgtctcccagtcacctgtcatacctggggggaaggggtaatgatggttattacctttattttactaatttatctatttcaacttattatgcaatatgtagaactttttttttttttttttgagacggagtctcgctctgtcacctaggctggagtgcagtggcgcgatttcggctcactgcaagctccgcctcccaggttcacgccgttctcctgcctcagcctcccgagtagctgggactacaggagctcaccaccatgcccggctaatttttttggattttttttttgtagacacggtgtttcactgtgctagccaggatggtctcgatctcctgacctcatgatccacctgcctcagcctcccaaagtgctggatttacaggcatgagccaccgcacccggcctacttagaacttttaaaaagacacaaaggttcttggaaatacagctaaatagatatcctgagtggccctctcaatgaaaataactggtgaccctaagtttcaaaattcccctcctccctgcagagggggaataggagaccaaggtcagacctgccccaagtggaagtctgataaaaggtccctatgcaggccaggcatggtggctcacatctgtaatcccagcactttgggagccgaggtggagatcacgaggtcaggagatggagaccatcccggctaaaatggtgaaaccctgtctctactaaaaatacaaaatattagctgggcgtggtggcaagcgcctgcagtcccagctacttgggaagctgaggcagaagaatggcttaaacccaggaggtggaggttgcagtgagccaagattgcaccactgcacttcagcctgggtgacagagtgagactccgtctcaaaaaaaaaaaaaaaaagtctgggcacggtggctcatgcctgtaatcccagcactttgggaggctgaggcaggtggactgcctgagctcaggagttcgtgaccagcctggtaaacacggtgaaaccctgtctctattaaaaatacaaaaaattagccgggcatggcgttgtgcgcctgtagtcccagctactcgggaggctgaggcaggagaattgcttgaacccaggaggcggaggttgcagtgagctgagatcatgacactgcactccagcctgggcgacagagcgagactccatctcagaaaaaaaaaaaaaaagaaaagaaagaaagaaaagaaatctacatgtatgtaccttatggtaaaactgcagaacaccaaagggaaaaatgatctcgaatgcagccagaatccatgtaataataattattaatgctgggtgatgggcacgtctggttcattatgctattttctctacttttatgtttgaagttttccataacaaaaagtttttaaaaggagaagacagccaaagtgaaaaccaaaacaagattctctacaaataaataataattacattgacagattacttcttaacaataatgaaaccagaagataatggaaaaagtttttaacacaataagagaaagtaaccatcaacctagaaccatacacccagcaaaaatatcactcaaaggccaaccaaaggcagttgaataaagacattttcatataaacaaaagctgggaatgtttatgaagcacacacctgcattaaaggaaattctaaaggaaatactttagagaaaaggtctgagacacgaaaagaaaaaatagtcaaaaaagtggtaaataggccaggcacagtggctaaacctgtaattccagcactttgggaagccaaagcaggtggatcactcaagatcatgagtttgagaccagcctggccaatgtggtgaaacaccatctctactaaaaatacaaaaattagcctggtgtggtggtgcacaactgtaatcccagctactctggaggctgaggcaggagaatcgtttaaacccaggaggtggaggtgagccaagatcgcgccactgcactccagcctgggtggcagagtgagactctatttcaaaccaacaacaacaaaaaaagtggtaaatttatgtgtaaatgcaaaacttcaacaatatagaacaaaaattataatgtatggaaggtttaaaacaaataactaaaatatataactgtagcatataggtcaggatgttctctaagtcaggttttgcattattcaggaggagaacaaagattttcattaaatttagactttgataagttatgtttgttaaatttgcttggaaaactatgtaaaaagctagatattgtgcataatttccatattagtaagaggaaaatggaatggggggaaaacaatctaaagaaggcatgaaaaaggacagaataaaggaacataaagaagatggcacagggccaggtgcagtggctcacacctataatcccagcactttgggaggctgatggggggcggatcacctgaggtcaggagttcgagactagcctggccaacatggtgaaaccccatctctactaaaaatacaaaaattagcagggcacggtggcaggcacctgcaatcccagctacataggaggctgagacaggagaatcgcctgaacccgggaggcagaggttgcagtaagccaagattgcaccactacactcccgcctgggcgacagagtgagactccgcctcaaaaaaaaaaaaaaaaaaaaaaaaaagaagacggcacagagagcacaatactgtagaaatgagtgcaaatatatcagtaattacagtaaatgtaaatggattaaatgtgccagttaaagattgtcagaatggataaacaaaatataatacactatttgcaaaagatgtatctaatcataaaactacagaaagatggaaaggatagaaaaagatacatgggaaaatgtcaaccaaaagaaagctggtatcacttatattcctatcagaaataaaggtataagaatgaccttcatttacagatgacaaactgggctcagaagctgggagacatagcagcaagtacagcctcaaactcaggccggattcctaaaccaggattttagaccatgttgtccctctgctctcttctcttttttaatcttttatggatcatatgtctggaatataagtttcattgcagaaaacatacaaaataatggggaaaaatagaactctgccatccagaggtgacagctgttaagtggtctagaggttcgatgcaaataagggctgtgctggcttcacaagaatcactggaagtctgctaaaaatactgattctaggacccaacacagagattccaattcattaggtttagggtggagtctcaacatctgaattttttaaccacttgggagtggttcctatgggctgccaagtttggaagattaatgctgtagatttgcactgtccaatacaataatcactaactacatgtgactacttaaatttaatatcattaaaattaaatgaaattaaaaattcaattccatagttgtagtagatacatttcaaatgctcaatagctcatgtggttcgtggctaccatactggacaaaacacagctataagacatttccatcactgcagaaaattggattggacagacaataagttccaagaaggcaaggatcatatctttcttgttcatagctgtatgcctagtatcaaatacatattaaagaggtgagtaatctggtgtatttctttccagtctcttagtctcctgctcactttcatatctgaaactgatggggaaatcctgagacttccccacctcaccctccaggagggaagaagagctctgtcggtcagaggttttggccaagggtcctggcatggtcagtccttaaaatcctatttaccacttcttggtttacagaggcaacttcacactcttttttcttttaaaggtcctagagagcagcccttacctcgaatgtttgtttcaaacacagaggcgttcacatcaatatcaaagtccacgctgtcctggagcacttcaaccactctttggaattctgagacattccccaaaatctggaaataaaaaagagacctgacaatgaggctcttacatgcatggaggcagattcagagtctgggatcctatgttgatgtggccctcactaattccacttaagacctccagtttctgtcctaggattggtgacagcagaagaaaacactgagagctagaaatcatctagagacttcataccaagagactggttaagtaaattcctaggtcccaattaagagtcacgatgttgtcatttaaatggacacaatataaagaacgcaaactacgcatagaagtcttaggttttttgtttcgtttttttgagacagagtctcgctctgctgcccagggtagagtgcagtggcgtgatcttggctcacttcaaactccgcctcctgggttcaagcgattctcctgcctcagccccgagtagctgggattatgcaccaccatgcccggctaatttttgtatttttagtagagacggggtttcaccatgttgatcaggctggtctcaaactcctgacctcatgatccacccgccttggcctcccaaagtgctgggattacaggtgtgagcgaccgcacctggccaaaagtcttagtttgacatttgcagtagataccagttgtcaccttcaaccttgtggaaaacagaacaggttggttggcccaaaacaaattcattcctaccctctttacctcatggcctcccaccagaggttggaaatccagaagctttctcggcctcctttgctgctgcagttgattgtgttacccagtcaattctgacccttgagaggtctactgggggcacttctgggaaggcttctgttttcttaataccaagggacaaacacagctaacatggcttttagtctctctctttctgccttgaactcagactcgatttctgaagtgatggcagctatgtgagaccatgacgtactaagcattagaataaaagccaaaacactaacgatactagaatgcaaagctacaaagaggctggtctctaatgacacagttgcgtagctgacccaatgctagaaattacctctagactttcttttacttgagaaaataaaccctctttatttaaaccgttagccaaatgcaatctcaatctctcttcttttgatagtaacatctcaatttaccctcgaggaatcactcttccccggcagtcactcctgtggtttgggagaggctgatcccatccctctagctgtggagtgggtacttgacctgaaccagtccaagtcttttttttgagacagggtcttgctctgttacacaggttggagtgcagtggtgtgatcatagctcatcacagcctcgaactctgggacttgagcaatgttggcctcccaaagtgctgggattacaggcatgagccaccacacctggccctttttacctttctaagcatcaggtttcttttatatcttttttttgtttgtgtgagacagggttttactctgttacccagaccagagtgcagtggtgcgatctcggctcactgcaacctctgcctccctgactcaaacaatcctcctacctcaccctcctccctaacaaatggagccacagacatgtgccatcatgcctaattttttatatttttggtagagacggggtttcaccatattgcccaggctggtcttgaactcctgtgctcaagcagtcctgccgccttggcctcccaaagtgctgggattacaggcgtgagccactgtgcccatccctaagcatcaggtttcttaacgataagaaggagtaaaggtactaacctcaagaagttgttagaagaattaatacatgtctgtactaagccctacagaaacatactaactagtcactgatattatttctttataattttttttgagatgaagtttcactcttgtcacccaggctggagtgcaatggtgcaatctcggctcactgcaacctccgcctcccgggttcaggcaattctcctgcctcagcctctccagtagctgggataacagacatgtgccactatgctgggctaattttttgtattttaatagagatggagtttcaccatattggccaggctggtctcaaacccctgacctcaggtgatctgcctgcctcggccttccaaagtgctgggattacaggtgtgagccaccatgctcagcctgatacccttttattatcattgaacatggccactagaatgtaagcctctgaaaacaggagatgtcaaagtctctgtatcccccatagagctatgcaagcctatcacaattctccgtacataacaggtcctctataaatgtttgctaaataaatgaatctgcataagttgtagttcgtttttcccctatctagctaggcaaccacagccggacgcttcagaatcatgagatgcaaataaaaggcctaggagaggaattcatttttcacccacagtcacgctgccaaaagaggaaggatgttggttatgtaacagtggaaaggaaaagaaacagacgagatacttaccagcaaggtgtccagtgcatcaattagagtcagagaaaaactgcaaaaggacagaaatcccagccgcttagtaagaaaatcaaataccagatattatggctgccctagatctgatccccctaaaactaaatgaggcaaagtaatgcctctgcctgtcccacttacagtcacaacagagaaaccacagtgaaaatcgcaggtattctctgacccacttaatgcacctgggagggttggctgatgtagctcaattgtaattaaatacatcacctatagtctggcattctcctctaccattgggaggcagtataagattgcagcttaaagcacaggcctttcaccaattttcacctctaggaatttaattcacagtgaacagctgtttgagagtgttcatggcagtattgcttagaacagcaagaggctggaaagaacccaactgtccacccattaatgggtgattaaactgtgttataaacagtgcaaaactatgagttatcaaaaagattgttatcaagacttctatgtgctgatggaaagacattcgaattgtttttaatgaaaaagtcagggtggtttagtatgtttccatctgtttcaaaaagacatgctgacagaaagcagacagcaattgttagggtcagtggtggtgcagggatgaactataaagggccacaagggaactttttaaagtgacagaagtgtttcatatcttgactgtgatggtggtcacttcaaacgagtgtaggctgggcacagtggctcatgcctgtaatccgccagcactttgggaggcctaggtgggtggatcacctgaggtcaggagttcaagaccagcctggccaaatgacaaaaccccgtctccacaaaaaaattagccgggtgtggtggtgggctcctgtaatcccaactacttgggaggctgaggcaggagaatcgcttgaagccaggaggcggagtttgaagtgagccaagatcacgccattgcactccagcctgggtaacaagagcgaaactccatctcaaaaaaaaaaaaaaaaaaaaaagagtgtattttattatatgtaaattatgcctttaagaagttcattttaaaaagatacacatacacacatctatatatataatggtataaaccaagaatatttctggacagatacaaaggaaagttaatagttggaattctagggtatgggagatatttattgtatataatcttttaccacttgaatttgccatttgtatttactttgtttcaacttaaaaaaataaaaaccatcacaagttttgagtttaatttctcccgaccttagcacattcgtgtgtaaaacagggataatggcacctaactcgtaggggtattaagatactgagctgagatctgaatgacaagcagcagccagtgatgggaggaaaatggggagtgtatttcaggcacggggcacaccaactacaaagacttaagttttaggagtgtcacactccttcctggatctgaatgcccacctacataatgaaaggggtgggttttctaattcttggagcccttccacggtatctcgttactccagaaattgcctatgtccccacagctgatgcctgttactgctggggctgagctcagcgatccagcccacccggctaatccaggactttttttttcactgcgagaggctaagtggatcctggaggtgatagtaagaattgcggggagcgcggctctagctcagctgggagctttctggtgccggtgaggagaccatgaagccaccagccccagctgacccgcccgccgaggcccagagagtcagaccctggccgccccttgcccctccgctcgcactacctgccccaggtgtcgtgcccgtcacaggtgagaggtcgcagctcatcgaagggaaaggcattctccaggtagctgtcgtaggcgtggtagaacatggccttgactcgctccctgggtgggggacgagaaatcaggcatggggcaagaacacaaaaacaagcgggggaagaacaagatacagggcggaaagtgggaatcactagctgatttctccctgggacctagcggctgtgtcggagcaagtcggggtctgggatggacggaaagggaaaggaccgggttcacgcttcccattccccaactgcgaaagggcgggtcacagttcacctgtagtgggcgggatctggcgcggagccgtcgggacctggcgcaccatggtgctgaggcagcagcgcgcacaggaggccgagcgggatgagcagccggaaaggcatagagctcgtgtcctctcagcgcccccgcagcagcagcagccactgcaaccagttcatcctgggagctgctgcgggttcttccgggaatccgcgccactgcgcctgcgcgctgagaaatcagcctctcacttccggactacaagcccctgaatgcaatgggcagcgaaacgcggccgaagagcaacttcggatgtacggtttcggcaacactgatcaacgtgtcttaaagtcagtggctgttgttactactgttattaattaatgttttaataataacagctagcatgtattgagcacttattgtgtactagtactgtacggagcatttaaaatgcattctctcattcatttttttcaacaaccttattaagtatgaaggcagggtaagcatgagaaatgttcagcctttaccattattacctagcaggacaagccgcagacaaaactcctcagacaccgggttaaagaaggaaggagctttattcggccgggagcgtcagctgactcacttctcaaaaacggagctccccgagtgagcaattcctgtcccttttaagagcttacaactctaagggggtccgcgtgagagggtcgtgattgattgagcaagcagggggtacgtgactgattaccggtgcaccggtaatcagaacggaacagaacaggacagggattttcacaatgcttttccatacaatgtctggaatctatagataatataaccggttaggtcaggaggggtcgatctttaattaccaggcctggaatgcatcgccgggctgtctgactactgatttcacttctgtctttcttttaactcctacattttctttgaggcagaaattgggcataagacaatatgaggggtggtctgctcccttatttagggatattgagtttcccaaaccagttacttgttgattgtataagacacaactcacatttatttgtccaaaacttccactcttttttttttaaaacctcttgcattttccgatgctgtcactcttgaggtttcctgaaatcccgtcagttctaggaattcatgacacttctctcctcccaatttgggatgtggttacacaatcatggtcccttcagtctccatctcaaaccggaagctttacccctgtcagccctgtagaatgtcttgggtaagaatgaataccctggttgggcgcggtggctcacgcctgtaatcccaacactttgggaggttgaggtgcgtggatcacctgaggttaagagatagagaccaacctggccaacatggtgaaaccccgtctttactaaaaatacaaaaattagccaggggtggtggcgggtgcctgtaaatcccggctactcggaaggctgaggccggagaatcgcttgaaaccggaaggcggaggttgcagtgagcgaggatcgcgccactccactccagcctgggcaaaacagcaaaactccatatcaaaaaaaaaaaaaaaaaaaaaaaaaaaaagacaaatgactaccctggggcactatagctttcaggaggtttgtgatccatttctccattccccttattcccaagtttctaaaatttggtcagcaccttagaccacagcaacacccatgactttggtcagtgtgacatgcggtagaaccaacactggatttgaagtcagatctaggatccagttaattacaactctgtcactcatctataacctgtgtatgtgaccctctccttctctggggctagcatccttgtctataaataatgaggagtttgaacaaatggatctttaagatccttttcggtcgagctttctatgattctaggattggctatctcttatttgctgaaaaagtcagatggaagtgatagctcagtttgttgagccagagtgcagccaggcctcccaaagtgctgggattacaggcataagccactgtacccagcctgggatgtttttagaaactcttcttggccgggtgcagtggctcacgcctgtaatcccagcactttgggaggccaaggcgggcggatcacgaggtcaggagttcaagaccaacctggccaatatggtgaaaccctgtctctactaaaaatacaaaaattggccgggagtggtggcagacgcctgtagtcccagctactcaggaggctgaggcaggagaatcgcttgaacccgggaggtggaggttgtagtgagccaagatcaagatcaggccactgcactccagcctgggagacagagcgatactctgtctcaaaaaaaaaaaaaaaaaagaaactcttcttggggcttccaaatggaagggaaaggagatgacagtaagctgagacctggataacaacacaggagcactgtattcgtttcctgtgattcctgcaacaaattaccacaaaccaagtggcttaaagcaacagaaatttattctctcgcagtttgggaggtcaggagcctgaaatcaatttcactgggctaaaattaagttattgacagggccacacccactccaaaggctctaagggataatccgttccttgcctctctagattctcctgactgctggcattccttggcttatggttgtatcactccagtatctgcccgtgccttcatatcgccttctctgtggatgtgtcacatctccttctgcttttctcttataaggacatttataattgcatttaggaccccccccgcgccccccccaacccagataatacaggataaactcccattccaagatttttaacttaatcacatctagggggaaaaaaaaaaaaaaacaccatttttccaaatagagaaacatttacagtttccagagattaggacctggactttaggtggctgtttccagcctagcgcagggactaaatatttttcagacctgggcctttccctgtgacgaaattcaccttctccatattataaatcctatagcttatctttttgtctcccattcaaaattctagtgtggataaaacttttgcaggaagggtgggttcaggttgcctggatttggtaacgataggtctctctttatgagcaagattgaaacactcatgattttcctttatattctttttctagcttgatgtcattctccacactgtcactgaacaaataaaaccatgacttacgttttcacaattcatgtgactatatgttctctaatgagaataaaaaaattgttttaccctctggaaagtatcaggactcttctttctctcactctgtgtttatgatattggattctagaaggttatgacccaccagtgaagtgtcacacttgagcatttacttgtgaagagactcagggtaagttgcctacctctctgagactcaatttcctattgtaaaatacagaaattgatgaggccataaaggaattctgggaattaaatgggataatgaaagtgaacattctcagcacagtgactggtatatattaaattcttgatacatattaattctcttccctgcctccccaactcttcttttttttttaaggcagggcagttgtttccatttactgagcatctgccccgagtcatccaaggtgttataggcaatagttcctaccctcaaaagtttgaggcacagtgctgagcatataactaagattccaaaataatcaagtcatagtcctttcccttgaagtgcttgcaattttgttagaaggggaagatgtcaattggagaatacttggaatcatagggtgttcaagtcttccctgtgggtgaatagagtttggagggagctcagatcacatcagtatctgaggccaatgtcctcggactctgtgttcagtggaacaagacttggactggttgtcggaaacccttggtcttgttacttgtttatccactatctctgtgtgatctcgggcaagtcattttcccttttggggactcagtttccatatctggaagatgaaagagtgagactatctctcagcacaaggaaaatattaacagatccatacagttattgcaaaaaatcagaaaacagaattcaacacacatcgactgcacaaatttcccccagaaacatccatgaagcagaataaaacagtgggacagcattccaaatggaatttgactatttgccaactaaacaaggaagaggagggggatggggagggggacaagaagaagaaggagaaaatagtcacgtgtattgataatagcgaacatttacatagcaagtaatgttctttgtactttacatccatcaacaccattaatccttaccacaaccctctgagaaagtgtcattatcaccattttataaaccaaaaacctgaagcacagattctaagaattgaagaaagatttagcaacttaatcaatgtctcataccgaataagtagaagagtcaagatatggacccaaacagcctatactctaacgcattaatgaaaataatgacaaatatataaataaaaggccaacacagaattcaacaatggagatctggcgaactgctacagtgtcctctagctttagcttcatgtggttttagggtcaacatttccttcccttttgctagaaagttagagggaaaagctcagttccctgaagttggaagccaaggcattttagatcccctttggccaagtacactcgacctcttttagcagggaagaatcctttttgtagcatctggaggtcatttggttctcccaactcccaaagcagggcttgcacaatacatacttttgacttgccaaaaaataagtttatccctgggaaatttcccatccatctgttgctttgtagaaatgcttgaactttgcatgcagtatgtccaaacatttcgatcgactccctggttagagtctcagacctcgttattattattattattatttgagatgagagttttactctcgtcacccaggccatagtgcagtggcgcgatcttggctcaccacaacctccacttcctgggttcaagtgattctcctgcctcagcctcccgagtagctgggattacaggcatgcgccactatgcccggctaatttttatatttgtggtagagacagggtttcgccatgttggctaggctggtctcgaactcctgacctcaggtgatccgcccacctcagcctcccaaggtgttgggattacaggcattagccaccgtgcctgaccttacacttttattcttattttatttttcttctttttgagatagggtctcgctctgtcacctaggcactatcaccactcacttcagcctcgacttcccaggctcaagtgatctttccacctcagcctcccaagcagctgggaccacagatgcgtgacactatgcccagctaatttttaatttttttgtagagacaaagtctcgctgtattgccgaggccggtcttgaactcctgggctcaagcaatcctaccgccttggtctcccaaagtgtagagattacagaaatgagccaccacacctggcctcagaccacgtttttattatgctcatattccaagtgaactcagacctgtagctaaatctgccacagaattgtgcactttaaaatggttcagatggtaagttgtgtcacaagtattttgtcacaatttcttaaaaattaaaaagtgagccctctccctctccctctccctctccctctccctctccctctccgtctccccacggtctccctctcatgcggagccgaagctggactgtactgctgccatctcggctcactgcaacctccctgcctgattctcctgcctcagtctgccgaatgcctgcgattgcaggcacgtgccgccacgcctgactggttttggtggagacggggtttcgctgtgttggccgggccggtctccagcccctaaccgcgagtgatccgccaacctcggcctcccgaggtgccgggattgcagacggagtctcgttcactcagtgctcaatggtgcccaggctggagtgcagtggcgtgatctcggctcgctacaacctacacctcccagccgcctgccttggcctccctaagtgccgagattgcagcctctgcccggccgccaccccatctgggaagtgaggagtgtctctgcctggccgcccatcgtctgggatgtgaggagcccctctgcctggctgcccagtctggaaagtgaggagcgtctccgcccggccgccatcccatctaggaagtgaggagcgcctcttcccagccgccatcacatctaggaagtgaggagagtctctgcccggccgcccatcgtctgagatgtggggagcgcctctgccccgccgccccatctgggatgtgagagcgcctctgcccggccgagaccccgtctgggaggtgaggagcgtctctgcccggccgccccatctgagaagtgaggagaccctctgcctggcaaccgccccgtctgagaagtgaggagcccctccgcccggcagctgcccctactgggaagtgaggagcccctcagcccggccagccaccccgtccgggagggagatgggggggtcagcccccccacccggccagccgccccgtccgggagggaggtgggggggtcagccccccacatggccagccgccccgtccgggagggaggtgggggggtcagccctccgcccggccagccgccccgtctgggaggtgaggggcgcctctgcccggccgcccctactgggaagtgaggagcccctctgcccggccagccgccccatccgggagggaggtgggggggtcggccccccgcccggccagccgccccgtccgggagggaggtgggggtgtcagctccccgcccggccagccgccccgtccgggagggaggtgggggggtcagccccccgcccggccagccgccccgtccgggagggaggtggggggggtcagcccccctgcccagccagccgccccgtccgggaggtgaggggcgcctctgcccggccgcccctactgggaagtgaggagcccctctgcccggccagccgccccgtccgggagggaggtgggggggtcggccccccgcccggccagccgccccgtctggtgggggtgtcagccccccgcccggccagccgccccgtccgggagggaggtgggggggtcagccccccgcccggccagccgccccgtcagggagggaggtgggggggtcagccccccgcccggccagccgccccgtccgggagtgaggtggggggggtcagcccccctgcccggccagccgccccgtccgggaggtgaggggcgcctctgcccggccgcccctactgggaagtgaggagcccctctgcccggccaccaccccgtctgggaggtgtgcccaacagctcattgagaacgggccaggatgacaatggcagctttgtgggatagaaaggcgggaaaggtggggaaaagattgagaaatcggatggttgccgtgtctgtgtagaaagaagtagacatgggagacttttcattttgttctgcactaagaaaaattcctctgccttgggatcctgttgatctgtgaccttacccccaaccctgtgctccctgaaacatgtgctgtgtccactcagggttaaatggattaagggcggtgcaagatgtgctttgttaaacagatgcttgaaggcagcatgctcgttaagagtcatcaccaatccctaatctcaagtaatcagggacacaaacactgcggaaggccgcagggtcctctgcctaggaaaaccagagacctttgttcacttgtttatctgctgaccttccctccactattgtcccatgaccctgccaaatccccctctgtgagaaacacccaagaattatcaataaaaaaataaatttaaaattaaaaaaaaaaaaaaattaaaaagtgaggctgggcacagtgcctcaagcctgtaattccagcactttgggaggctgaggcgggtggattgcttgagcccaggaatttgagaccagcttgggcaacatggcaaaaccctgtcactacaaaaaaaaaaaaattagcagggtgttgtggcatgtgtccataatcccagctactcaggaggctgaggtgggagggtggaataaatggaatgtgatccaacaaaattattattattattattttgatgatgtctattgcccttttgaaatacccaattctggcagggtgcagtggttcacgcctataatcccagcactttgggaggccgaggtgggcagatcacctgaggtcaggagtttgagagcagcctggccaacaaaccccatctctactaaaaatacaaaaattagccagctgtgttggtgagcgcctgtaatcccagctacttgggaggctgaggcatgagaattgcttgaacctgggaggtggaggttgcagtgagccgagatcatgccactgcactccagccagggtgacagagcgagactctgtctcaaaagaaaaaaaaaaaaaaaaaagaaatacccaattctttcacagaaaatatgttcttactggctggcggggagaggggtggttggtaaatgggaaaagggtgcttcctttgctgatatccaaagcagatactttctctgcctatttgatgatacaaaactagccctaccacaccaggctaagggagagaagaggatccgtgtcctacagaattccccctattagcctacctgccccatagcccccaaactctgctgctaatcaactgtgccaggtcaggaagaaagaaactggagggaaagaagaagcctaatagattgaaaatcccttcagcaaacattttttgagagccttataactgttagtgtctactgaattaaacttactagtgttaagaaaaattatctgaaacatgttactaaggtaaaaagatgattgtgtgactttttgctgtcatgataaagcattgactagcaagtctacttgtcatctgtccctgaagagaaacgtgacactattttcatattaattacggcccagacattgtacaattctgtaaagtaataagatgtgacaatttcctttcctgcctggtagagaagataatcccaaaggttatgatattattactctgtaggacattaacccatttagtatttaatttagcaatcttacttcaatattttccttttccattgactataaaaactcaagttcttttttcttttttttgagacaggtctcacattgttgcccaggctggagtgcagtggttcgaacacggctcactacagtcttgacctcccacatcccaggctcaagtgatcttgcctcagtccctcaagtagctgggactataggcatgtgccaccatggccagctaatttttgtatcttttcgtatagacggggttttgccatgttgcgcaggctggtctcaaactcctggctaagcgatccacccaccttggcctcccaaagtgctgggattacagatgtaatcccaccatgcccagccaaaactctagttcttatattctattttgaactggctttgtcgtcctgcttgtcccttcattaatgagttaaatgaaactctgacccatgctcactgtctatttcaatgagaattatggttggttttgtttgtttgtttgtttgttttgagacagagtctcgctccgttgcccaggctggagtgcagtggtgtgatcttggctcactgcaatccccgcctcccagattcaaatgattcttttgcctcagcctcccaagtagctgggattacaggcacctgccaccactcccagctaatttttgtatttttagtagagacggggtttcatcacgttggctagactggtcttgaactcctgacttcaagtgatccatccactttggcctcccaaagtgccgggatttacaggagtgagccactgcgcctggccaagaattacatttttaacatgctgacagttgtccttgacactaagtgtcagaccctggattaagtaatttatagacccatgatactcctttgagatagtttttgtccccattttccagatgagaaagtgaaggcacaaaaagataaaagaaattttctcagtgccagttttgtgccaggagctttactaagttacagtttttttctccttccctcgaagtcctgtttatctattcattgattaaaaaaaaaaaaatcattgagtacttacgatgtgccaaatactctgctaagctggtaatacagaactttaaaacacattctctgccctcttatggcttttggtgtggaagacagatgcataaatagacaattatcatttaaagaagtaagggaggaaaactctctgaacttattctggtttgggggctgcctgcaaaaaaattaattaatgaattaattaattaaaaattaaaaaaaataaaaagaactaagggaaagagagggctccagtagaacagagggagcatctaaccctggcttgtggacatgaagtcagggaaggcttcctgtagtaggtgacacctgagtattctaataggaattagtagggctgaagaaggtggtgggaagcacctcaattcaaaattttgattcctttgtgtattatgaaaggctcttctgactcctgcttacctcctcatatcacttcttccttcctatcacctactcctatttggccatacttaagtattactgctttctcaagtatgttatattctctctcctttcctattatattcttttgtaccttcttcaccctgtacttgaaacaactttttcctcacccctacttgccccttaggcattatcggggttttttgtttttgtttttttctttgtttgtttgtttttgagacagggtcttgctctgtcacccaggctggagtgcagtggtgcgatctcagctcactgcagcctcagcctcctgggctcaagtgatcctcccacctcagcctcccgagttgctaggactacaggcacacgtcaccacgcctggctaatttttgtattttttgcagagcccagatgaactcctgggctcaagcaatcctcccacctcagcctcccaaagtgctgggattacaggtatgagccaccggacccggcctggaaagcattcctttttaaaccaggaaaatggcaagaatattctcttatattctctatcactttttttttttttttttcctggagacagagtcttgctctgttgcccaggctggagtgcagtggcacgatctcggctcactgcagcctccgcctcctgggttcaaacgattctcctgcctcagcctcctgagtagctgggattacaggcatgcaccaccacacccagctaatttttgtatttttagtagagatggggtttcaccatattggccaggctggtttcaaactcctggcctcgagtgatccacccacctcggcctcccaaaatgctgggattacaggcgtgagccactgtgcctggccttctattactatctctgttaaacattgtactagaggttatagccagaacaataagttgaaacaaacattataaaaattaaaaaagaagaaataatctgtcattatctattggtgctatgaatatgcatgtagaaaatccaaaagagtctaaaaataattattataacaaacaaaagaatttattaaggttgctagaaacaaaactaatgcaacaaaatcatcagtacttctatatgctgagaataagcacaccatgagatttaaaaaaaaattatttgcaataatatttttaaaatatggagaacttgactgggtgcagtggctcatgcctgtaatcccagcactttgggaggccaaggcgggcagatcacttgaggtcagagtttgagaccagcctggccaacatggtgaaaccctgtctctactaaaaatacaattagactggtatggtggtgtgtgcctgtaaccccagctactctggaggctgaggcaggaaaattgcttgaatctgggaggtggaggttgcagtgagccaagattgtgccattgcactccagcctgggcaacagagcaagactctgtctcaaaaaatatatatacgtatgtatatatgaagaacttagaggggaaaacttaacagaggatgggccatatgttcagagagaaaattatgaaactctgagagataccaaaaaagatgtaaacaaatgaaaaaaatacaccctatcatgcactggatgattcaatattgtgaagatgtcaattcttcccagtcatttacatgctaaatgcaataccaaccaaaacttcatcaacgtgataaaaaagattccaaaatttaggtgtagacgttcaaatattcaaaaatagctaagacactcttgaagaacaaagaggaaaggcttgatctacaagatataaatacattatgaaataatactaatcgagggccaggcactgtggctcacgcctgtaatcccagcactttggaaggccaaggcaggtggatcacctgaggtcaggagttcgcgagcagcctgaccaatatggagaaaccccgtctctactaaaaacacaaaattagccgggtgtcatggcgtgtgcctgtaatcccagctactcgggaggctgaggcaggagaatctcttgaacccgggaggcagaggttgcggtgagctaagatcctgccattgcactccagcctgggcaacaagagtgaaacaccgtctcaaaaaaaaaaaaaaaaaaagagaaaaaaaaatttaaaaaaaaaagaaataatactaattgagataatgagcattggtaccaggtgagacaactggaccactgaaacagaatagacatatttactgtaagtcagagatgccactgcagatcagtaaggaaaggccaacttttgataactggttctgtctgggacagtggatatccattaaaagaaactaatcttgacctccacttcataccatacctcaaggtgaaagacaaaactaaaaagctttgaacataaacagaatatcttcatgaccttggggtttagggaagggttgcttaaataaggcacaaaaagtacaaactgtaaaggaataggttgataaacataaccaccttaaaattaggaacttttgtttatctaaagacatgataaagaaagtgcaaagcggctgggcgcggtggctcatgcctgcaatcccagcactttgggaggctaaggtgggaggatcacttgagcccagaagtttgagaccagcctgggcagcatagcaagacctcatctctacaaaaataaggttttttaaaaaaaaaaaaactgtgacggttaaaccacctactcaagactcagcaatggtggatgccctacgacacctaggtggcgtagcctactatacccctaggctccttggtatagcctattgctcctaggctacaaacctgtagaacatgttatgatcctgaatactttaggcaactgtaacacaacggaaatatttgtgcatcttaagaaatctaggatttgctggcaagatggccaaataggaagagctctggtctgcagctcccagtgagatcgatgcagaaggtgggtgatttctgcatttccaactgaggtacccggtttatctaattgggactggatgggcaatgggtgcagcccacggagggcaagccgaagcagggtggggcgtcgcatcacccaggaagtgcaagaggttaggggatatcccccctagccaagggaagcggtgagggactgtgccctgggaaatggtgcactacggcccagatactgcgcttttcccaaggtcttcgccacctgtagaccaggagattccctctggtgcctacgccaccagggccctgggtttcaagcacaaaactgggcggccatttgggcagacaccgagctagctgcaggagttttcttttttttttttcataccccagtggtgcgtggaacgccagcaagatagaatcgttcactctgcaggctgggcgcggtggctcatgcctgtaatcccagcactttaggaggccaaggtgggcagatcacgaggtcagaagttcgagaccaccctggccaacatggtgaaaccccgtctctactcaaaatacaaaaattagctgggtatagcagtgggggcctgtaatcccagctactcaggaggctggggcaggagaatcacttgaacccaggaggtggagcttgcagtgagctgagattgcaccactgcactccagcctggacgacagggcgagactccgtctcaaaaaaaaaacaaaaaaaaaaaaacaggtttgttcaatccgctggaaagggggctgaagccagggagccaagtggtctggctccatgggtcccacccccacagagctcagcaagctaagatccactggcttgaaattctcgctgccagcacagcagtctgaggtcgacctgggatgcttgagcttggtggtgggaggggttgtccgccattgctgaggcttgagtaggtggttttaccctcacagtgtaaacaaagctgcagggaagttcaaactgggtggagcccaccacagctcagcaaggctgctgtggccagactgcctctctagattcctcttctctgggcagggcatctctgaaaaaaaggcagcagccccagtcagggacttacagataaaacccctggccagcacggtggctcacgcctgtaatcccagcactttgggaggccgagacgagtggatcatttgaggtcaggagtttgagactagcctgactaacatggtgaaacaccatctctactaaaatacaaaaaaaatgagccaggcgtggtggcaggggcctgtaatcccagctactcgggaggctgaggcaggagaattgcttgtacccaggaggtggaggttgcagtgagccgagattgtgccactgcactctagcctgggtgatagagtgagactctatctcaaaaaaaaaaaaaaatctccctgggacagagcacctgggggaaggggtggcttggaaacagcttcagcagacttaaacgtccctgcctgatggctccgaagagaactcccaggacaacattcgagctctgataagggtcagactgcctcctcaagtgggtccctgacccctatgtatcctgactgggagacacctcccataggggccaacagacacctcatacagaagagctctcgctggcatctggtgggtgcctctctgggacaaagcttctagaggaaggaacaggcagcaatctttgctgttctgcggcctccagtggtgatacccaggcaaacagggtctggagtggacctccagcaaactccagaagacctgcagcagaggggcctgactgttagaaggaaaactaacaaatacaaaggaatagcatcaacatcaacaaaaaggacgtccactcagagaccccatctgaaggtcaccaacatcagagaccaaaggtagataaatccatgaagatggggagaaaccagcacaaaaaggctgaaaattccaaaaaccagaatgcctcttctcctccaaaggatcacaattccttgccagcaagggaacaaaactggaaacagagaatgagtttgaagaattgacagaagtagacttcagaaggtgggtaataacaaactcctccgagctaaaggagcatgttctaacccaatgcaaggaagctaagaaccttgaaaaaaggttagatgaattgctgactagaataaccgtttagagaagaacataaatgacctgatggagctgaaaaacacagcacgagaacttcgtgaagcatacacaagtatcaatagccgaattatcaagcagaagaaaggataacagagattgaagatcagcttaatgaaataaagcgagaagacaagattagagaaaaaagaatgaaaagaaacaaagcctccaagaaatatgggactatgtgaaaagaccaaatctacatttggttggtgtacctgaaagtgacagggagaatggaaccaagttggaaaacactcttcaggatattatctaggagaacttccccaacctagcaagacaggccaacaatcaaattcaggaaatacagagaacaccacaaaatcaatgtgcaaaaatcacaagcattcctatacaccaataacagacagagccaaatcatgagtgaactcccattcacaattgctacaaagagaataaaatacctaggaatacaacttacaatggatatgaagacctcttcaaggagaactacaaaccactgctcaaggaaataagaggtcacaaataaatggaaaaacaatccatgcttatgtataggaagaatcaatatcgtgaaaatggccatactgcccaaagtaatttatagattcaatgctattcccatcaagctaccattgacttccttcacagaactggaaaaaactactttaaatttaatatggaacaaaaaagagcccccgtatccaagacaatcctaagcaaaaagaacaaagctggaggcatcacgctacctgacttcaaactatagtacaaggctacagtatacaaaacagcatgatataccaaaacagatatatagaccaatggaacagaacaaagccctcagaagtaacaccacacatctacaaccatctgatctttgacaaatctgacaaaaacaagcaatggggaaaggattccctgtttaataaatggtgttggaaaaactagctagctatatgcagaaaactgaaactggaccccttccttacaccttatacaaaaattaactccagatggattaaagacttaaacataagacctaaaaccataaaaaccctagaagaaaacctaggcaataccattcaggacataggcatgggcaaagatttcatgactaaaacaccaaaagcaatggcaacaaaagccaaaattggcaaatgggacctaattaaactaaagagcttctgcacagcaaaagaaactatcatcagagtgaacaggcaacctacagaatgggagaaaatttttgcaatctatccacctgacaaagggctaatatccagaatctacaaagaacttaaacaaatttacaagaaaaaaaacaactccatcaaaaagtgagcaaaggatatgaacagacacttctcaaaagaagacatttatgtggccaaaaaacatatgaaaaacagctcatcatcactggtcattagagaaatgcaaatcgaaaccacaatgagatactatctcatgccagttagaatgatgatcattaaaaagtcaggaaacaacagatgctggagaggatgtggagaaataggaatgcttttacactgttggtgggagagtaaattagttcaaacattgtggaagacagtgtggtgattcctcaaggatctagaaccagaaataccatttgacccagcaatcccattactgggtataaggattataaatcattctactataaagaatacatgcagaggtatgtttactgtggcactattcacaacagcaaagacttagaaccaacccaaatgcccatcagtgatagactggataaagaaaatgtggcacatatataccatggaatactatgcagccataaaaaaggatgagttcatgtcctttgcagggacatggatgaggctgaaaaccatcattctcagcaaactaacacaaaaacagaaaaccaaacactgcatgttatcactcataagtgggaggtgaacaatgagaacacatggacacagggaggggaatatcacataccagggcctgtcagggggtagggggctaggggagggatagcattaggagaaatacctaatgtagatgacgggttgatgggtacagcaaaccaccatgacaagtgtatacctgcgtaacaaacctgcacattctgcacatgtaccccaaacttaaagtataataaaaattaaaaaaagaaatctaaacacagaaaaggtacagtaaaaatatggtatagtcgattttaaaaggtacacctgtagagtgtgtacttcatgcatggagcttgaaggacttggtgttgctctgagtgggtcagtgagtgagtggtgagcaaatgtgatggcctacgacattactgtacactactgtagaatttatcaatactgttcacttaggctgcactaagtttatgcaaaaatatttttctttcttcagtaataaattaaccttagcttactgtaaaaaaaaaaaaagtgaaaagttaatatttatgtgttctgtgttcaggaaaccaggaggaatggatttggctgaaactggaatacatggatagataaggctagagagataggcaggagccaagccaacaatactaggctcccatcaattgctggggcaggcaagagcaggcatcatcctgagtgtttggagcttcttttcatgttccctaagttggggggtgttggggggatgatacagggggaaattctgattaagacttaacatctattcctttgccttctcttcaagaagtcatacttgatgtccatccctcctggacagggtccgttctgtttgctgctaagctcctttcttatctctcccacctactgaacacgtactgtgttctgggagttttgaatgcatcatcttgtttatcctcatgagatggtctaataatgaagaaagcatgttttggcatccaactcacctgggtatgagtcccagctctgccttttactagctggatgtctttgagcagctcagttccctgttctgtgcttctgtgtcctcatctgtaaaatgggaacgacggctatttcttcagactgccctccctccctccttttctgtctccctccctccctcccttcctccctccctctttcccccttcttcttttcttttctttctctctttctttcttttcttctttccttctttcttttttctttctccttctttccttccttccctcctctctctctctctttatttctgtctgcctgtctttcaacagggtcttgctatattacccaggctggtctcaaactcctggactcaagcaatcctcccagcttggccccccaaagtgctaggattacaggcctgagcacctggcctggactttcttcagacttttcacagggtactagtgagaaaaaaatacatggactctgcttacttaatactgtgcctggcacattgtaagctcttcgcacatgttattgttattattcctcatcctaagggggaagtgcctttgaagggtccacactcctttgttacccaaattgggccaggttgcttaaactgccgttcttcagtagctaacaacaggggtgggagagcctggtcctctgaagtccagctgggcacacggccagtccctggcctgtccctgctcctgctgccctggcaaggcctccctcacccactggggctgcaccagcactggccccagctcagcttcctgtctcccttatcttcctccagcatgtgctctctggagtaggaaacaccaccgcttgcttccttcatttccctttgctcaacgggaccctcattctttaggtctcagtcaaatcccagctgctggcctggtgcccactctgtgattttctacacctcagccacccaggccagatgcagtgtaggccatggctccaacagcagcatttctcttttcttccccacccccatccctgggtttagaatgagaaaaggctcaagttgcccccctcccaacttccctacccgcaacactctttttattttctctgttcccagctccatacttccatgcttttttttttttttttttttttttttgagatggagtcttgttctgttgcccaggctggagtgcagtggcaggatctcggcttactgcaacctccacctcccgggttcaagtaagtctcccacctcaacctcctgagtagctgggattacaggcacgccaccatgcccagctaatttttgtatttttagtagagacggggttttaccatgttgcccaggctggtctcaaactcctgacctcaggtgatccatccaccttggcctcccagagtgctgggattacaggcatgcccagtcccatactttctgagttcaaatcctcgctctgcacttccaagctgtgtgaccttgggcaagttacttaactatttttctgggctttgattttttttttttttttttgtacagaggagcagaggaggattcatcaggttgcccaggttggtccaaactcctgggctcaagggatccttctgcctgggcctcccaaaatgctgggattacaggcatgagccaccatgcccagtttttttggttgttgtttgttttgttttgttttgtttgagacagggtctctttctgtcacccaggctggggtgcagaggcacagacatagctcactgcagccttgaccttttgacatcctgggctcaagccatactcctgcctcagcctcccaagtagatgggaccacaggtgtgtactaccatgcctggctaatttaaaaaaaatttttttgtagagatggagtctcatatgttgccatgctggtcactaatttacaggcatgagccactacacccaggcagctttattttatttatttttttgtctgtagcatggaaacaatgagcatggtctgccccagagaaagtgattaaaggcctagcacatagtatgaatttaaagaatgttttataacatatatattaaacattcaagcatgttggaggtatgtgttaaaaaaatgtattgatggaaagtgatcaaaataatttttgagtcactgtgtgggagttaaattcacaaactttggcaccagagagagagagaaactttcaaattatagcttttgctgtgtgaccttaggtaagtcacttaacctctctgagcctcagtttcttagtaaaatggtgatgctagtgaaacccatttcacagggctagcataagaataaagtaagattatttaagtaaagagccgaacactgtttctggcctacaataagtgttacctataataatgctatcattgtctcactgttcaattttcagggctctagtatatgagaggggtgcttgggaaatagctgttgctgctgctatctgtccatgatggatcttaacctgattagaaaggcctccatgtggctgggcgtgggggctcgtgcctgtaatcccagcactttgggaggccaaggcagatggatcacttgaggtcaggaattcgagaccagcctggccaacatgatgaaaccctatctctactaaaaatgcaaaaattagccaggcatggtggcacctgcctgtaatcccagctacttgggaggctgaggcaggagaattgcttgaatccaggaggtggaggttgcagtgagcagagatcataccattgcactccagtctgggcaacagagcgagactccatctcaaaaaaaaaaaaaaaaaaagaaagaaagaaaaggaaagaaagcccttgatgtaatgagctctgtgtaagataatgtggatgaaagtggacccagaccctacccgcttagatggaaggctcacagcattcaattccaaattggttcaatcgtacactcttttgccctctcttatccatcccaaagtacccttcaagccttcaagggagaaaaaaggcaaagcaaaaatatgcacaacctcactaagaaccagaaaaatgcaaactaaaaccaaagagaaatgccattttacacccaaccatctgataatgccaagggctggcaaggatgtgaagcgagggaattctcatacactgctgggaacgtaaattggcacaacctttctgtaaaacagtttggcaatatctagtaaaactgaagatgcatatactttattactcagaaattccactgtcaagtttgcacctacaaaaactcccacatatgcacaaggactcgagtatgagaatgttcataccagcactgtttgtaatagcaaaaaactggaaaaaacttaagtgttcagcaacaagagaatggatacataaataatgatctattcccaaaattgatttttttttttgagacagggtcttgctctgttgcccaggctagagtgcagtggcatgatcatggctcactgcagtctcaacctcctgggctcaagcaatcctcctacctcagcctcctgagtagctgagaccacaggcacaacccatcacacccagctaattttattttttttgtagagatgggggtctcactatgttgcccaggctggtcttgaactcctgggctcaaatgatccacccacctcggcctcccaaagtgctgggataatacctccccagccggaatattttaaagcagtgaaaatgaatggtctacacatagccacatgaatgaatcttattaatacattaagtgaaaaaagcaaaaggtacagaggaatacatacattttaataccatttatataaagctcaaaatatgtgaaataccactatctattgtttagggatatatacataagtagtgtaagtatacagaaatataaggaaatgaaaaatatcaaatcttcattttcatctgaagtggttacttcaggggctgtggcagggagagagagatgcagctgaggaagagtccatagggggcttcaactatattagcaatattgtatttcttatgcttggtggtggggataggtatgtttgaaatgtaatcctttaagcatgaaataactcttcaaaaatgaaatatttcaggctgtgcacagtggctcaggcttgtaatcccagcatgttgggaggctgaagtgggcggatcacctgaggtcaggagtttgagaccaacctggccaacatggtgaaatcccatctctactaaaaatacaaaaattagccaggtgtggtggcaggtgactgtaatcccagctacttgggaggctgaggcaggagaatcgcttgaatctgggaggtggaggttgcagtgagccgagatcacgccactgcattacagcaagactccatctcaaaaaaaagaaaaaaaaaaagaaaaaagaaatgtttcataatttttaataaaaggcaagacaatataaattggtagttatttaagtcattctacttttcctgaggcccagtgcaggaaaacaaagttcctatccttgttccaactagaccattttgataagctgcaaaaagaaaagactttgatgctatttcttagccagtttgcaacagctgagaggtgagcatggaagctcttgcatatattcagttcagagaatgggtgcttagtttatgtccagagtttgtcccagatttcactatgacgtcagctctccggggagaagtatataaaataaaaagttaaaatccctctcagtcctttacccaatcctattccccagaggtaatctctattgacagtacccctccagatattttccctatgtatatacaaatacacagatacacactgaaagttaattttggccaggtgcagtggctcctgcctataccagaggattgcttgagtgcaggagttcaagaccagcctgggcaacatagcgagaccacatctctagtaaaaataaaaaaaaatagctaggcgtggtggcacagtggcacgtacctttagtctcagctactcgggtggttgaggtgggagaatcacttgagcccgggaggtcaagcctacaattagctgtgattgcttcactgcactatagcctgggcaacagagctagaccctgtctcaaaaaaataataataaattttatatatatatatgaggatgaaattacatatgtattatttgaacagaagtgaaatcttttctttttttttttcagacagaatcttgccgcatgacccaggctagaatgcagtggtgtgatctcggccctctgcaacctccacctcccaggttcaagcgattctcatgcctcggtctcccaagtagctgggattacaggcatgcaccaccatgcccagctaatttttgtatttttcgtagagacgttcgccatattggccaggctggtctcaaactcctggcctcaagtgatctgcccacctcggcctcccaaagtgccagcagcatgctcggaggagtgactttaaagcttttctacttgcttcctagagtaagggacgcattttacactgctatccaaaactcatcatagaaacatacacacacaaaaccaaagcacacatatacaactgagcaaatatttcatgacataacactttctcttactaagggtgacgcgctgaaattttgtattctgtcctatttcattttttaaaaatggtaaccatgacctgctaaattgatttcattgtccactaataaattatgacctcagtttcaaaaagattgctttaggtaaccaatcatcttctgagatttatacagattgctcataattctctcctattttttaaaaacatgctgcagtgaactgctttacactcattttatgactacttctgagaccaagatcccggattatgtaattgttatttacttaaaattctggtaaaatgtagccattatactggaaaactaaattttaatcttggatctgtcaccaccatgatatataaactttgggcaagtccctgcacctctctggacctcaatctccccatcagcaacctgctgatcctactcccaggagtgtgctctaagttgaaagtagatgccccaccccctgagtcagcgccggcaggacttctcaccaagcccttctcccccttttccgctccctgttcctggttcctaggaagcagcccaaggagaagggaaaaggcaggtctgggcaggagggagcaatgaagggcggggcagagggagggcaggagggaggccggccccctagtaggaaatgagacacagtagaaataacactttataagcctcttcctcctcccatctcctggcctccttccatcctcctctgcccagactccgcccctcccagacggtcctcacttctcttttccctagactgcagccagcggagcccgcagccggcccgagccaggaacccaggtccggagcctcaacttcaggatgttgacaacattgctgccgatactgctgctgtctggctgggccttttgtagccaagacgcctcagatggtgagtcgggggcacatctcctgcctcaggatggttctggagaatctcagtctatctgggcacatggcaagaccacaggagagcttatctcacagcatctgtgtctgcagctggctagatctctctacagggcaggcagagtcttggggactggttcgtgtcccaaagccaaggtgagttagtacatttaagcccctgaaaagggggagatgaaagaggctaggggaaacaggatgactggaaacatgagaaagaaaccagcagagagggtaggagaatcagccccagggagaggggagaaaggggaactgagggtgatggtagataggggtacatctaggggagacgggaagaggctcagaagagaagagaaatggagggaatgggaagaccctgggaaaactgatggaagaagtgggggaagagtggggcagagagaggttaggggaggctagggaaaatggaaggagactggtcgcagctggtggaactggggagaaagagatgctgtgcctaatagaacttatgggcgatcaggctactgaagtggccctgtttaagcagaaaagggagttattaccctccattataattgcacaggggcctcctttcccctctctcacaatccccgtaacttcagtctccccctcagagaggcagcaaataataaccagtattcaatgagtgctcactatggttaatacatgtattgacccatttaacttgcacaaacccctaaaggtgggtaatattattactatctccattttatgaggaggaaactgggtcacagagtagttaaggaccatgtctagggttatccataaatatacttattcacatctgcagatacaaagcacaacttctcaaatgcaaacacagacaggacccactcacacacacagatttacaaccccggactcatccaaatgtgctctgggcatcaactctgtgccagcctcttttctgggtgtaggaagcagagattaccaagcatggttccatagcctagaggagtccagtgtggcctgtgtgtgtttggagacagccaggtagtatcccgtgagatacacactaatatatggtggtctgggatcactgaaacagacacactgtgtctcgtggggcatcagaaaaaaatttccaagaagagggcaactgagctgggtctttttttctttgcttttctttcttttttcttttttttttttttttttttttttgagatggagtcttgtgctgtcacccaggctggaatgcagtggcacaatttcagctaactgtaacctccaactcccaggttcaggcgattctcctgcctcagcctcctgagtagctgggactacaggcatgtaccaccacgcctggctaatatttgtatttttagtacagatggggtttcgccatgttggccaggctggtcttgaatccctgacctcaagtgatccgcccgcctcggcctcccaaagtactgggattacaggcatgagccaccgcgcccagtctctgagctgggtcttaaatcatgaataaacttcgccaggcagaaaaagggaggcagagcaatcctgacatgctattcatgtgtcagccaaaggcagcatgaggaatcccaactagtttgatatataagcagcgggaagcggccagaaaaggcagcaggggccaggtctctagcagccttgaatgccaggctaaagactctggacttgatcctgtggggaggcagtgtagcagaatggctgagtgctggacttgactgcctacgtgcaaaccttggctctgctacactatctctgtctcagtttcccatgtagactggggttaataatagtagctattgcattaagccactggggaaaggcacaaagataataatgtatgtaaagcccattgcccaggttataataagcactgaatcgacattggctatgattatttttgattaatgaaggggagggggttatggcactggaagattttaagtaggaaaaggacatgatctcatccctgggtcaggtggaggtcggaatagagaacggggagatgaagtagaaagttactaccccagtctagatgagacggatgaatcctgaatcagggcagtggaagaggagatggagaacaggcgatggaattggaattttattcaggtcaggatttgttaaccatttgttccgttggttaacaggaaacggggggagggagagccgagggtgaaaaaggaggcagaaaggagtgtctcttccactgcaggcctcagtttcctcatctgtaaaacggagataataatccctgtcctgtcctcctggcagagttactgtcagcgtcaaacgggagaagcggtgggagggcacattatagtttatgaagggtcgagaaggcgggcggccagcctcgaggtagggggttattatcttccgctgcccgccgccccctcccacgccggcccaggctgaagctgactctgcccgcaggcctccaaagacttcatatgctccagatctcctacttccgcgacccctatcacgtgtggtaccagggcaacgcgtcgctggggggacacctaacgcacgtgctggaaggcccagacaccaacaccacgatcattcagctgcagcccttgcaggagcccgagagctgggcgcgcacgcagagtggcctgcagtcctacctgctccagttccacggcctcgtgcgcctggtgcaccaggagcggaccttggcctgtgagtaggcgcgcagcgggggcggggtctgggcggggctagtgggggcggggcctggcgggtgggggcggggcctggcggatggaggcgggctgggacttgcagggacccggcagccactggagctcggtggcgcctgggcctttgaagattgctgggtgggggctggagagaggcagttgtccccgctaagaaagccccgactcgggcggtcgtcctgctggcataacctcttgggatagaccctgttggaaggccctgacaccgtgacgtcgaaggtccccagaaaactcctcacccctcgcctcacagtcctccaactccttttcttcatagatctccgtccttcccttcccacagcccccagcacttcaccccccaccctccagccacttctcatacaagctgatgacttcgctcttagctccactcatgacccgaactcttcccccaaagaccccaagttcttctctcaaagccccactccttccccgtcacaaccctaactccttcttctcaaagaccccaatttcttttctcaaagcaccaagcaccactccgtcccccttcccccaccatcatggcctttaactcctttctctcctagtcccccaccccaccccccttttttttttttttttttttttttgagacggagtcttgctctgtcgtccaggctggagtgcagtggcgcgatctcggctcactgcaacttccgcctcccgggttcaagcgattctcctgcctcagcctcccaagcagctgggactacaggcacccgccaccacgcccggctaattttttgtatttttagtagagacggggtttcgccatgttggccaggctggtctcgaactcctgacctcaggcgatccacaagcctggcctcccaaagtgctgggattacaggcgtgagctgccgcccctgccccagcctcaccccctgttttttttttctattacagttgaacaaggcctgacaattcccttttttcatcacagtccctggccccttctttcttagcctctaacaggctaaccccaaacccctcctcacagccccaggcccttctccccatagttccctgacctagactcccctctcctcacagcactgactcttgccttctcatgttcttttccccttggtgggcctcgccccacacctggcaccctctctgcacagtcccctgaccctgactgtctatccacagttcctctgaccatccgctgcttcctgggctgtgagctgcctcccgagggctctagagcccatgtcttcttcgaagtggctgtgaatgggagctcctttgtgagtttccggccggagagagccttgtggcaggcagacacccaggtcacctccggagtggtcaccttcaccctgcagcagctcaatgcctacaaccgcactcggtatgaactgcgggaattcctggaggacacctgtgtgcagtatgtgcagaaacatatttccgcggaaaacacgaaaggtatgatgggacggggcccaggcctgcaagctggggagagggcgggttccagacaaatggatggacctgaaggatggatgcctagagcaacaagaggcccacagctgggggtttgggacagaacacacgcagcttcagtcagttggtaaacgggtccctttcctctggggcagaaacgctttggggtttgactcaaatcatggactccttgggggcctattcttcgggctaactctttgcatgttctgcagggagccaaacaagccgctcctacacttcgctggtcctgggcgtcctggtgggcagtttcatcattgctggtgtggctgtaggcatcttcctgtgcacaggtggacggcgatgttaattactctccagccccctcagaaggggctggattgatggaggctggcaagggaaagtttcagctcactgtgaagccagactccccaactgaaacaccagaaggtttggagtgacagctcctttcttctcccacatctgcccactgaagatttgagggaggggagatggagaggagaggtggacaaagtacttggtttgctaagaacctaagaacgtgtatgctttgctgaattagtctgataagtgaatgtttatctatctttgtggaaaacagataatggagttggggcaggaagcctatggcccatcctccaaagacagacagaatcacctgaggcgttcaaaagatataaccaaataaacaagtcatccacaatcaaaatacaacattcaatacttccaggtgtgtcagacttgggatgggacgctgatataatagggtagaaagaagtaacacgaagaagtggtggaaatgtaaaatccaagtcatatggcagtgatcaattattaatcaattaataatattaataaatttcttatatttaaggcattgttatctcctccactttgcaaaatttctggaaaagtaacctatacccatttcttctgcttccttatttctcactcattctttttttttttttttttttttttgagacagagtcttgctctgttgcctaggctggagtgcaatggtgtgatctcagctcactgcaacctctgcctcccggttcaagcaattctcctgcctcagcctcccaagcagctgggattacagatgcatgccaccacacccagctaatttttgtatttttagtagagatggggtttcaccacgttggccatcctgacctcgtgatccgcctacctcggcctccccaagtgctgggattagacgtgagccactgcgcctggtcttctcactcattcttagacccagtgcaatctgacttctctataaactactctgagatcaccagtaacctctaattgtcaaaccatcaccctacatggtatctgcaaatttgcggactagaactctctttttgccttaacttctgagataccatacttcaatttttaaaactgttctgtctactttttttcaatccctttgactatgtcatcttacacgattcaccctggaaatgctggcttccttagaattccattttttggttccttttgttcctgtttgaactataccctttctaggtgacctactgaccttcatggctgcaaatactatctacctgtggtttccatggagaagcaatataattttatctttaagagcatgtgttttgtcggccaggcgcggtggctcacgcctgtaatcccagcactttgggaggccgaggcgagaggatcacttgaggtcaggagttcaagacaagcctggccaacacagtgaaaccctatctctactaaaaatacaaaaattagctaagtttggtggcacgcgcctgtaatcccagctacttgggaggctgaggcaggagaatcacttgaacccgggaggcagagtttgcagtgagctgagatcacaccactgcactccagcctgggcaacagagtgagattctttttttttttaattctaaaaaaaaaaaaaaaaaaaaaagagtatgtgttttgtcatcagacttaagttttacttctttgaactagaaatttaacttcttcaagtctcagttttttttttttttttttttttttttgagacgaagtctcgctctgtcgcccaggctggagtgcagtggcgggatctcggctcactgcaagctccgcctcccgggttcacgccattctcctgcctcagcctcccaagtagctgggactacaggcgcccgccactacgcccggctaattttttgtatttttagtagagacggggtttcaccattttagccgggatggtctcgatctcctgacctcgtgatccgcccacctcggcctcccaaagtgctgggattacaggcgtgagccaccgcgcccggcctaagtctcagttttttttgttcccaaatggtattaataaaatataccaaagggtctaagaaaaacaatacccaattcataaaggcatgaagagtattaaataaaagtatatatgtaaaataatatgccaagcgcaagctgggcacggtggctcatgcctgtaatcccagcactttgggaggccgaggcgggcggatcacaaggtcaggagatcgagaccatcctgactaacacagtgaaaccctgtctctactaaacaaaaacaaaaaattagccgggcatggttgcgggcgcctgtagtcccagctcctcgggaggctgaggcaggagaatggcatgaatccgggaggcagagcttgcagtgagccgagatcacgccactgcactccagccttggcgacagagtgagactccatctcaaaaaaaaaaaaaaaaaaaaaaatgccaaacgcaatgactggctcacacctgtaatcccaacactttgggaggcagaggcaggaggattgcttgagctcaggggtttgagaccagcctagacaacatagtgagaccctgtctctacaaaaaaaaatagaaaaaattagctgggcatggtggtgtgggcctgtagttccagttactcaagaggctgaggtaagaggattgcttgagcccagaaggttgaggctgcactgagccatgatcgtgccaccacactgcagcctggcaacagaccaagaaaaaaaaaaaaagatagtgtatgtatagtcagtaaatacagcagtggcttctgatctccagacctctcatttgcattgattctttaaaatcatctctaccttaatgttctgtagacatttcaaaatcaacatgttcaaaatcaaatttattatctatctccccaaatctgctctctctacttctgatgtttactgttcattaatggataacagaataaccatcaaatcatgtaagtggagagaactcagtgttaacctttatttactccctcttatttatccccatctaccaactacagtatctataaaacacattcactcctttctaccccattgcttttgttcaagatatcataattcctctctttctttgtggtaaacatgaaggtgtaccatccagttctacctccaaagaaagacttcctgttggccgggcatgatggttcacgcttgtaatcgcagcactttgggaggccgaggtggggggatcacctgaggtcaggagttggagaccagcctggccaacatggcgaaaccctgtctctactaaaaatacaaaaattagccgggcgcggtgatgcacgcttgtaatcccagctactagcaggggctgaggcaggagaatctcttgaacccaagaggcagaggttgcaatgagctgagatctcgccactgcactccagcctgggcaacaagagcaaaattccatctcaaataaataaataaatacataaataagaaaaaaaagacttgccgttcagctatagggggaatagccagcagatagcttccgcttgcttcagttctttcaatgtctgcctcagctgtagaggacagtcctgcacaagatcatgcccatcccagggctgccctcactcggtgcctaagcaaggcaggggtataaaagttcggtcattttggccaactgcaggacaactctgagaataggttggattgacaagggctagccagggctggaaatattcactccagagctccctgccagggaggctgggtctttgtcagatctgcattgccgtttgacttctctcttagctcagccctacttcttccccctggtaagcatcttgcacctcaaactctgtctcagcctctgcttccagataacccaacttgtgtgtgtgtgtctctctctctttcaaaattgagaaattttctcaatcttgtctggaccatggcagcagcctcctcctaagaaattgcctctaatttctccatattttaattcatcttctacatggcagtaagaaacacagatctaattgtgtcattattccgttttttgttgttgtttgttttttgttttttgttttgttttgttttgttttgagacagagtctctctctgtcacccaggctggagtgcagtagtgtgaacttagctcactgcaacctctgcctcacaggttcaagcaattctcctgcctcaacctcccgagtagctgggattacaggcatgtgccaccacgcccggctaattttttgtatttttagtagagtcggggtttcaccatgttggtcaggctggtcttgagctcctgacctcaagtgatctacccgccttggcctcacaaagtgctgggattacaggcgtgagccaccacgcctggactgttttttaaatttctcattgagttaaattcagaatcctcaaaatgacattcaaggccttgcacaatgtggccccaacctaattttctaatttaattttaatttaattttattttattttattttgagatggagtctcactctgtcacccaggctggagtaaagtggtgcgatctctgctcactgcaacctccacctcctgggttcaagctattctcctacctcagcctcccaagtagctgggattgcaggcatgtgccaccacgcccggctaatttttgtatttttagtagtgacggggtttcaccatgttggtcaggctggtcttgaactcctgacctcatgatctgctctccttggcctcccaaagtgctgggattgccggcgtgagccactgtgcccggcccctcaaattttattttctaccatttctctttagccactgtgccttagattatttattttaaaagcatatttttaaatgacggaagtggtacaacaacagcaataacagagaagtttacaaagaaatttcataaaggaaaaacggaacgcctcctgctttctcattctccccaaatccttactccagaggtatgctaagattattagttgcaagcaacagaaaccaattctgccaacttaaggggaaaataagtatattggaaggttattaagtaatcctcagagttgatgggaaagccagataatcaagctcagaaagtagaaccagggaccacagccaaagtcacaccacaggaatggtattaaggatgccacagctggaagcactacctccatcaccaatgctgctgccatattaaaggaattctcctctgaccctgtgtctttacatcatttgttcaagagtcaatatcctgagtggaagcagccaaatgaccaagccttgatcatgttgcttttgccttagctgcaagtgcaggggggaaaaggaaaactttagatacctttgacttctcttgtgggaggtgagaacctgtctcccattaagactcacacagaggaagagatttcagatgctgggcaaccaaaacaggtacaggtgattttaaagaattgatgcaaatgagaagcctggagatcagtagccactgctgtatttactaactctacatatattatcttttttttgagacagactcttggtctgttgcccaggctggaattggtggcacgatcatggctcactgcagcttcaacctcctgggctcaaaaaacagaacaaaagaaaaataaaatagaaaagcaaaaacaacaaaaacccataaatgttcactatatctcacatcattaatttatttactcgtttaataaatgtttgtcagaaacttccatatagaaggctttatgttatgtactttggaagacacaaaacgattaggatatgatccttctcaaggagcccagtcttttcttgggaagataaaacatacaaaagagaacaacacaaggcaagatgcattgtataactagaagaaacacacaaataaaaatgtgatgttatgtggccgggcatggtggctcacgcctgtaatcccagcactttgggaggctgaggtgggcagttcacctgaggtcaggtgttcgagaccagcctggccaacatggtgaaaccgtctctactaaatatacaaaaattagccaggcatggtggcacgtgcctgtagttccagctactcaggaggctaaggaaggagagtagcttgcacccaggaggcagatgttgcagtgagttgagatcgtgccactgcactccagcctgggcgacagagcgagactccgtctcaaaaaaaaaaaaaaaaaaaaaaaaaaggaaagaaagaaagaaaaatgttatgctctgatttactcttgtagctatcatttacatattgctatatagtttttggaattctgtaacttgcgtttatcatttaatactctctttggtcttgtaagatagatataatcattttagattaggagacatgtttagggagaataagaaagttaataactgatatggtttggatgttttgtccctccaaatctcatgttggaacgtgacctccattgttagagatgggcataatgggaggtgtttgggtcatgggggcagatccctcatgaatggcttaacaccatcctttagtgttgagtgagttcttgttcagttagattacacatgagatctcgttgtttaaaaggatctgagacctcccctcctctttcttgcttccttctgtctcatcttatatgcctgctccccctttgccttccaacatgattgaaagcttcctgaggcctcaccagaagaagatgctggtgccatgcttcctgtacatcctgcagaagtgtgagtcaaaaataaacctcttttcttttataaattagccacttgcaggtattccagtatagcagcacaagaattgactaatatagtatcagagctaggattcaaacccgtgcctttgtgttctaggatttatgctttctctcctctactaaaactgcaggaatcagaggaatctaggggagaaacatggtatttgtgaattggtgagatatgaccatgcccagataggaaagatagacagaacagattcaataatgaaaataggaaaaagcagagtaaattttagacatttcttaaagaagatacaccagtggccaataagcacatgaaaagatgcccaacatcgttatagtcattatggaaatgcaaatcaaaaccatgagataccacttcataccatcaagaatggctataggaggatggatagaatcaatattgtgaaaatgaccatactgccaaaagcaatctacaaattcacgcagtccccatcaaaataccaccatcattcttcacagagttagaaaaaacaattctaaaattcatatggaatcaaaaaagagcccacatggccaaagcaagagtaagcaaaaagaacaaatctggaggcatcacactacctgatttcaaattatactataaggccatagtcaccaaaacagcatgatactggtataaaaataggcacatagaccaatggaacagaatagagaacccagaaataaacccaaatacttatagccaactgatctttgacaaagcaaacaaaaacataaaagtggggaaaggacacccttttcaacaaatggtgctgggataattggttagccacaggtagaagaacgaaactggatcctcatcttttaccttatacaaaaatcaactcaagatggattgaggagctgggcgtggtggctcacgcctgtaatcctagcactttgggaggccgaggcgggcagatcacgaggtcaggagattgagaccatcctggctaacacggtgaaacccatctctactaaaaatacaaaaaattagctgggcgtggtggcgggcgcctgtagtcccagccactcagaaggctgaggcaggagaatggcgtgaacccaggaggtggagcttgcagtgagctgagatgacgccactgcactccagcctgggtgacagagcgagactgtgagactctgtcacaaaaaagaaaaaaacacaagatggattaaggacctaaacccaagacctgaaactgtaaaatttctagaagataacattggaaaaacccttctagacattggcttagccaaagatttcaagacaaaaaaaccaaaagcagttgcaatataaataaaggtaaatagctgggacctaattaaaccaaagagcttttgcacggcaaaaggaacagtcagcagagtaaacagacaactcacagagtgggagaaaatcttcacaatctatacatctgacaaaggactaatatccagaatctacaatgaactcaaacgaatcagtaagacaaaaaaaaaaaaaaaaaaaatcaatcccaacaaaaagtgggctaaggagatgaatagacaattctcaaaagaagatatacaaatagccaacaaacatgaaaaaatgctcaacattactaatgatcaggaaaatgcaaatcaaaaccacaaagcgataccaccgtactcccataagaatggccataatcaaataataaaataatagtagacgttgacgtggatgcagcaatcagggaacacttctacactgctggtgggaatgtaaactagtacagctgctatggaaaacagcgtggagattccttaaaaaactaaaagtagagctaccatttgatccagcaatcccactactgggtatctaccccgaggaaaagaagtcattattcaaaaaagatacttgcacacgcaagtttatagcagcacaattcaccattgcaaaatcgtggaacaaacccaaatgcccatcaatcaatgaatggataaagaaactctggtatatatatatgatggagtactactcagccataaaaggaatgaattaacagcatttgcaatgacctggaggagattagagactattattctaagtgaagtaactcaggaatggaaaaccaaacatcatatgttctcactgatatgtgggagctaagcgatgaggatgcaaaggtataagaatgatacaatggactttggggacttggggcaaagagtgggaggggggtgagggataaaagactacaaatatggtgcattgtgtactgcttgggtgacgggtgccacaaatctccaccaaacaacttactcatgtaaccaaatgccacctgtacctcgataacttatggaaaaataaaattttaaaaagaatggctataggaaaaaagacagacaataacaagtgttggcaagaatgtgaagaaattggaaccctcatacattgctggtggcaatggtatagcactttggaaaacaatttgacagttcttcaaaaagttaaacatagagttattgtgtggcccagcaagtccgctcctagtatatgcccaagaaaattgaaacatacatccatgcaaatacttgtacatgaatgttcacagaagcattattcctaatagccaaaaatggtaataatccaaatgtctgttaattgatggagaaacaaaatgtagtattttaatacaatggaatattatctagccatgaaaatgaggtactgacacatgttacaacacggatgagccttaaaaacatgataagtagtccgggagcagtggctctcgcctgcagtcacaacactttgggaggccaaggcgggtggatcatgagatcgggagttcaagaccagcctgaccaacatggagaaaccccgcctcttctaaaaatagaaaattagccgggcatggtagcacatgcctgtaatcccagctactcgggaggctgaggcgggagaatcacttaagcccaggaggctgaggttgcggtgagccaagatcgcgccattgcactccagcctgggcaacaagagtgaaactccatctcaaaaaaaaaaaaaaaaaaaatgataagtaaaagaagccagtcacaaagaaccaggtattatatgattcaacacacgtgaaacatccagaataggcaatctgaccaggcacagtggctcatgcctgtaatcccagcaatttgggaggccaaggcaggtggatcacaaggtcaggagatcgagaccatccttgctaacatggtgaaaccctgtctctactaaaaaaaaaagtacaaaaaagagctgggcatggtggcacgtgcctataatcccagttactcgagaggctaaggcaggagaatggcgtgaacctgggaggcggaggttgcagtgagtggagattgcgccactgcactccagcctgggcaacaaagcaagactctgtctcaaaaaaaaaaaagaaaaaaaaatagcaatagctgtttaagtcagtggcctgcaaaacatgttaacaattaggtcaattccttctttgcgcttcctcaatccatagtttgatctatcttcctccaaatctgctctgtcactcaggctggagtgcagtggtgtgatcccagttcactgcagtctccatctcgcaggctcaaacgatcctcccacctcagcttcctgagtagctgggactacaggcatgcacctccaagcctgcctaaatttgttttgtttgtttgtttgtttgttttgtagagtcagggtttcaccatgttgcccaggctcgaattcctgaactgaagtgatccacctacctgggcctgccaaagtgctgggattacaggcatgagccaccacacctggcctgaacacgcttatactaatggtgaaataatgttgggtagctgtaagtggcttgcccaaagttccacagtgatgtggtacaagaactggcactagagcttgggacttctgacttctgatcctgagctattgctgctacatcattccatgagaggcattaggaatcataggttaaagaggtaaggtactacttggagggattctctgaaaatttttgcccatgtccaaaagcaggagaggtaagtaatcagggaaacagtgggatgaataactctgaccgtttagggagaagatatgatcctcatttccaggagtttctacacagggtgaagagtgaatggaaggttcatctgcttatgcttacgtatgtgaatacatgttcatagctacatgaccttagataagtcagtgcccctctctgagagggagtttgtaatctctgagatatctaaggtatctcccagctctgataactaggattctacattcctaagtccagatggctgacaggacaattgtaaaggtcctagaagttccattcctctttttgggaatgatcttagaatgtttggcttgggtcagttacgtggcagccagactattagagctccagttggagtttacaagagaaataaacaaatctgaaataaaggtaaacaaatgactccctggcatattctaaaagtatccttctgggtggcttggcttactggattccccatcttttaattcagttcaacacgtgtgccttgattttatatctctgccaggtggcctgaggtttaggttttggaccgcattctttttccaactcagccaactgttgctgaggactgttttatgcaaagaattgtgctaactgctagcagggatgcaaaagtgggtaaaacatgatctctgcccaggaactgatagtctagaaggagaagcatacaaagcagtttattttaacacagaaggaatgaaaagattcaaagtaattataagctatgtactgaaagaaagagatctgggaaggctacacagaggccatagatttcatctggggcttgaagaagagaattacagtaggtgaaaaggggaaagatgtttctcctttcctagactaagatctttgagggcagagattacatcttatttatctctgtgttcctgatacccaacatagtgcctggcacaaggaaagagtccaatacatgtgttttgaatcaatgaataatgagtggattctagactgatataatagcacaaagacaaagtggataaaagtgcaccttatgtttggggaatgctaaatggtctgatgtggttgctccgaatattggttatataaggaaatgttatgggaaatcaaattttagtaccagattaagaatgccatgctaagaagttatacttagtctataggcaatagttaactatttactcctctaggacaaaatacccttgggttgtgggaagtcagggaccccgaacagagggacctgctgaagccgtgacagaagaacataaattgtgaagatttcatggacatttatcacttccccaatcaatactcttataatttcctatgcctgtctttactttaatctcttaatcccatcatcttcataagctgaggatgtatgtcacctcaggaccctgtgatgattgcgttaactgcacaagttgttcataaagcatgtgtgtttgaacaatttgaaatctgggcaccttgaaaaaagaacaggataacagcgacgttcagggaacaagggagataaccattaggtctgactgcctgggagctgggcaggacagagccatatttctcttattaccaaaaatgggtaagagaaatatagctgaattctttccccagtaaggaatattaataattaacagccctgggaaaagaacgcattccgggggggggcctctaaaatggccactctggaggggtgtctgccttatgcagttacagataagggatgaaacacaccctggtctcctgcagcgtccccagacttgctaggattaggaaattccagcctggcgaattctagtcagaccggttctctgctcttgaaccctgttgtttatcaatgacaatgcatgcacagtgggacatggaacttcattaataattctagtttcgccctgaccttgtgatctcgccctgaccttctgccttgtgatcttttgttgcccttgaaacaagtgatctctgtgacccacaccctattcgtacactccctcccctttgaaaattgctaataaaaacttgctggttttacggctcagggggcatcacggaacctgccgacatgtgatgtctcccccggacacccagctttaaaatttctctcttttgtactctttccctttatttctcagaccagccaacacttagggaaaatagaaaagaacccacgttgaaatatcgggggctggttcccccaatacccttgttcatctttgtatccttagtatctacaacagtgccaggaatttagaagttagtcaataaatggctggatgaatgaatgaattgaagagttttgaggaaggaaattatttcatccaatctgcaccttactttactgataataatccctcgcctttttgtacaattttgtagtcacagaaacattttatcctattatgtcatgaaaaattttattgatatgctcaaaaagcttattaggaaagaaaggcagatattattatcatttcctatagatgttattattctcatttcctggcaacgttattattctcacacccagtaaaaagaaaccaaaactctatttcttctaatatctcttggtatatccgatgatctgttgtatgtgtactggcatataacagggttctcatgggtagccttaatcttgcatcacactcactataatcaggatttctacatatcccaaaaaatagatccaactcgcaatgcagggatattgtactgattacttcatggggatcctggctgtaccataccccacacagcagaagcttaatcaattcttagacatttctgttctttttcttaagcttgatctctctcaacatcaacgaacttatctctcttccttctctttcctctcacaaccttgcccccttttcccacccaaacaaaaaacaaaacccattattttattaagcctttcatttttcagtatgtttatttttctcagcaaaacaaaagccctgtagtttttcttatttccttaaacatggtgttttatttcatccaaatgcaagtgaagaggagattagatttggtttgtggaattccagggaacagattaatgaatgagaggaagtcagagagaaataaatgttagtttaatgtaactttctgacccagcaattcaataatggaactggctgtttcacagagtagtgaactccctgttactggaagtatttggcatgtcaagtccaacttctgacctctaaaaccgcatgtgaccgtcctacatatgttcaaagatgatggtcctgttctcctaaatcttttcttctttttttgagacagagtctcgctccgtcgccaggctggagtgcagtggtgtgatctcggcccactgcaatgtctgcctcctcagttaaagtgattctcctgcctcagcctcctgagtagttgggactacaggcacgtaccaccaggcccagctaattttcatatttttagtagagacagggtttcaccatgttggccaggatggtctcgatctcttgacctcatgatccacctacctcagcatcccaaagtgctgggattacaggctgtgaaccaccgtgcccagcaatcttttcttctccagattaaacatcttactttcttcaagggttccttatttgatgtggcagttcagtaacctgctattgttcttctggacttgttacaatttgtcaatttctcatgcatttatttaaaaaaatttattgagtcgggtcactagaattactaaataagaaaaagaaaattattgagtgacttctatggttcagacgctgttttaggacgtgggaatagagcaatatagcagagaacaaaaacaaagtctgtcttagaagctacagtttactgggagggacagaccctaaacaaataatttttttttaatgtcagagataattagtaggaaataggtagaaaaataaggaaggtcgaagggagaataactgagttgctgttttagacagcataatcagggcaggcctctggaataagatgacagttgagcagagatatgaaggaagtgcaagagtggccaggggaagaacaagccaatttagatagaccgaacaagtgcaaaagctctgaggagtaagcttggtttatttcatgaacaaggaggccagtttatctgaagtggtacaggcaaagagaagagaaagagcaggaggcaaataaccgagggcctaataagccaattatctgtactttgctatttgttctgagtgagatggaaaggcattggaggctttcgagaagaggactgacgtgatttgacttgcatttgaaaagcatcactatggctaccatggggggaaacaaagtttaaaaggcaaagaaatactcagggacctccaaggatactcatacattcctgttaggaggcaataatatgggtgaaaaatgatggtggcaaggacaagggtgataccactacttacccattacccatcagaatagtcagaaagaaaaagacaaacaaggaaggaaagaaaagacagtattggcaaggatacaggccaattagaactttcctacactgctgttggtaaggtaaattgatatgaaacaaccactgtttagaaaaccgcagtatctactaaagttgaacatctgcctcctaggcatatgcctaacagaaacgtttacctatgttcactgaaagacatatacaagattagtcatagctgtaagaattaaagaaagaagagagaaacacgaagggcggctcgacagtcaacagggacaggtttattctgaataaacttgagtggggcagctggccaagttaggtcagagccacactctcttacagactaagtgtttttaaggattcagggtgggagaatttatcagaggcttggactgcttctgtgtttctttgttgtgcttatctgggagggaaagttgtgtgtctgttcccatacatctttctgcagctgcaggcatatcccccgggttgcttttagcttccctatcttagtgcacctgaagggaaaggaatgtgcttattagggcctactgttttactgggagccatcgtatgagggtgaagtttggcagttacccaggagactttccccccacctccctctgtacccaagctgtcttatctatgttttactgtctgctctttctatttgtacttagaagagagtgatttccttgaaatgcacgaggctagaaagggagctggaacttaaagtggcagtgtttgttcgagatgacagtgctcctgctctgtcaatagcagtattctttgtaatatccccaactaaaaagtacccaaacaccatcaagaatagaataatgaaacaaattatactatatttacataatggaatatacaacgagagtagaaaaacttaaactacaagtcttaatataagtgaatgtcacaaatataatattgatcaaaagaagccaaacacaaaaaagtataaactatatgattacatttatataaatttcaaagacacacagaactaacctgtggtgttagaagccaggatattggttacatttgggaagctaatgattagaagggagacatgagggcttctgaggcaatgccctgtttctttctttcttttttttttttttttaagatggagtctcgctctgtcaccaggctggagtgtagtggcgcaatctcggctcactgcaacctccacctcccaggttcaagccattctcctgccacagccccccgagtagttgggcctacaggcgcatgccaccacgcccagctaatttttgtacttttagtagagacggggtttcactgtgttggccaggatggtcttgatctcttgacctcgtgatctgcctgcctcagcctcccagagtgctgggattacaggcatgagccaccgcacctggcctgccctgtttcttaatctggatgctggctatatcaataggctcactttgtgaacattcactaagttgtacatttataatttgagcactttcctgtatcagtgttatgcctcaataaagtttacattacaaaggaatgactcagaggttttgatctgtgcaactggaggctataattgacatttattgaaatggggaagctatagaagaagcaggttttggtgggaaatgcattcattatgtacatactacatttgatatttattagacatccaagttgaaatgctgatagaatgcagttggtatacaagtctgcagttgagggaaatgtctaggctgaagacctaaatttgagagctcactatatagataacatgtaaactcataaagctggatgggatcacctaaggaatagtctagacagagaaaacattcaagtactaaaccctgaggacgccccaacatttaaaggctggaaattgaggagaaaccagtaaagaaaactgagtagccagtgaggtgtgataagagctgagagagtggaatctcagaagccaggtgaaaaaagtgttctaaggaggaagtaaccactgtaacagatacagcagatagtggaataaggtaaggactgatcatcggttattgatggagatcactggagaccttgataaacagcagttttggtggtgtggtagggacaaaagcctaattagaatgagctcaagaaacaaactaatttgagacagtgactataaataactcttttgaggagtttggtttgttttacagaagaacagagaagtaagatattaaaaagaatattaattaaggatatgaagcagtgttgggttaagtaactaaggaggcttatgggatcaagaaaagttttttctcttaataaggtagataataaagtatgtttgtacacttacagggataatcaatagagagggaaaatttgatgacacaagaaaaagagagggcagtggctggagtgatgtcctggagcaggttataaaagaggttagactccaaggcacaaatggagagaccaacttagctaagatcatggacagttcctctagggaggaaagagctagagaaagggatcccttaaatctgtacgtgagccaagagaaattgcaagctcactaccaagttgcacatgtgcttggtaaaaagaaagcttggtaatggctttgataactcaactgtaatataaatcaccatctgactgtcagactaaccccagagtggcatggggtagattcaaacagcctagcaaagactctgaaaatgaactgacactgcaaccacccacagcaggtgagacaaagcttgtagtctgaaactaattgagttatttgcctgctaaaataaactagtcaccatccagataatttaaacaggactcagagtcccacaatctaacactcaagatgggcaagatacaatccaaaattacttaatatacaaagaaccaagaaactgataaatgtttaaaggaaaagaaaacaaatagatgctaatccccaaattatttagatgttagaattatctgacaaaaactttaaagtagctattataaccatcccccatgaggtaaaagttaaacatccttgaaataaatagaaaggtagaagttcttagcagagaaatagaaattatgaaaaagaaccaaatagaaattatgtgaagtaaaaatatttgctgcagagctcattagtagaatggagataacagatggatgaatgaatgagtgaatttgaagatagatcgatataaattattcaatataaagatcatagagaaaaaaatattttaaaaatgaacagtctacagatataccatcctgaatgcacctaatcttgtctaatttttgaagctaggcagggtcaggcctggttaggatttggagggagaccacctgggaatactgggtaatgtaggctgtcaattaaaaaaatgtttttaaacaatcagacacctactatgtaccgataaaattttgtaataaaaaaattcaaaaagtaaacgagaataaataagaataaagaatgtgatgttggccaggagtggtggctcacacttgtaatcctagcactttggaaggccaaggtgggtggatcacctgaggtcacgagtttgagaccagcctggtcaacatcatgaaaccccatctctactaaaaacacaaaaattagccaggtgtggtggtgcttgcctataatcccagctactcgggaggctgaggcaggagaatcacttgaactggggaggcagagattgcagtgagctgagattgcaccattgcactctagcttgagtgacagagcaagagtctgtctcaaaaaaaaaaaaaaaaagaaaaagaaaagaaagaaagaaagaaaaagaacatgatgttttagatatatattaaaaatagtctgggcacagtggctcatgcctgtaagctcagcactttgggaggcagaggtgagcagactgcctgagctcaggagttcgagaccagcctgggcaacatggtgagaccctatctctactaaaaatacaaaaaattagcacagtgtggtagcatgcacctgtagtcccagctactcaggaggctgaggcaggagaatcgcttgaacccaggaggcagaggttgcagtgagccaggattgggccactgcactccagcctgggcaacagagtgagactgcctccaaaaaaaaaaaaaaaaaaaaaaaaaaattaacagagcctcagatacctgtggaaaaatatcaaaagctctaatattggtgtcatcaatatttctgaaatagaggagaaagagactgatgtggaaaagtatttgaagaaatgatggctgaaaacttcataaatttggttaaagatacaaatttacagaattgtaaagctcagtgaaccccaaaaggataaaagcaatgaaaaccccacccaccctaatcaaacttctgaaaaccaaatattaggaaaaaaattttaagagtagccaccaaaaaatcacatgttacatatgggggaacaataattcttatgactgtagatttttcatcagagaccatggaagccagaagacaatggaataacacctttaaagtgctgaaagaaaagaactgtcaacttgaaattttctatctagtgaatattccctttgagaataaaagtgaaataaaaacattctcagataaagaaagcctaaaagaatttgtctccagaacacctgttctgaaagaaatgctaatagaagccaaagtgaaataataccaaaaggaaacttggaactacagaaatgaaggaagagcaacagaattggtatatatctggataaagttaggttatttttctctccttacataaagttatttatgatcattgaaagaaaaaattataacacagtctaggagagtttcaatgtatgtagatgtcatggataggacaattataaacaacagggggaaggtaaagggacccatatacaggcatacctcattttattcattttcccatcgtgttttgtagatattgtgattttacagattgaaggtttatggggcaagtctatcagtgccatttttccaacagtatatgttcacttcctgtctcttgtatcacattctggtaattcttgcagtatttcaaacttgttttttcttttgtagagacaaggtctcactatgttgaccaggctggtcttgaactcctggcctcaagtgatcctctgcccttggcctcccaaagtgctaggattacagatgtgagccatcgaacttagcccaaactttttcattattattatatctgatgtggtgatctgtgatcagtgatcttggatgttactattgtaattgttttggggtgtcacaaatcacacctatataagatggcaaacctatagttgataaatgtagtatgtgtctggctgctccactgaccacctgttccctcacctttctccctcttcttggccctccctattctgtgaggcaatatacattgaaattaggccaatgaataaccctacaatggcctctaaatgttcaagtgaaaagaagagtcacgtctgtgtgcggtggctcatgcctgtaatcccagcactttgggaggccgaggtgggcggatcacaaggtcaggagttcgagactagcctggccaacatggtgaaaccccatctctactaaaaatacaaaaattagcctggcatggtggcagatgcctgtaatcccagctactcaggaggctgaggcaggagaattgcttgaacccaggaggcaggggtcacagtgagccgagatcgcgccactgcactccagcctgggggacagagcaagactccgtctcaaaaaaaaaaaaaaagaaaagaagagtcacatacatctctcactttaaatcaaaatcatgatatgattaagcttagtgaggaatgtacatcaaaagactagataggtcaaaagctaggcctcttacaccaaatggttagccgagttgtaaatgcaaagtaaaagttctcaaagaaaattaaggccaggcgcggtggctcacacctgtaatcccagcactttgggaggccaaggcaggtggatcacgaggtcaggagattgaggccatcctggctaacgtggtgaaaccccatctctactaaaaaaaaaaaaatacaaaaaattagctgggcatagtagcgggtgcctgtagttccagctactcgggaggctgaggcaggagaatggcgtgaaccagggaggtggagcttgcagtgagctgagattgtgccactgcactccagcctgggtgacagagtgagactctgtctcaaaaaaaaaaattaaaagtgctactccggtgaacacatgaatgataaagtgaaacagtcttaatgcttatacagagaaagttgtagaggtctggatagaagattaaacaagccacaacattcccttaagccaaaacttaatctagatcaaatccctaactctctttaattttatgaaggctgagagaggtgaggaagttgcagaagaaaagtttgaaggtagcataagttggctcctgaggtttagggaaagaagccatctccagaacataaaagtacaaggtgaagcagcaagtgctgatgcggaagctgcatcaagttctacagaagatcgagctaagatcactgatgaaggtggctacactaaacaacacattttccatgtaggcaaaacagtcttctattggaagaagatgccatcaaggactttttttttttttttgagatggagtctcactctgtcacccaggctggtgtgcagtggtgcaatctcagctcactgcaacctccatatgctgggttcaaacaattttcctgcctcagcctcccaagtagttgggactacaggtgtacaccaccatgcctgcctaattttttgtatttttagtagagatggagtttcaccatgctgaccaggctggtctcgaactcctgacctcatgatctgcccgcctcatcctcccaaagtgctgggattacaggcatgagccaccatgcccagccagccacctaggacttttatagctaaagataactcattgcctggattcaaagcttcaaagcacaggctaactctcttactaggggataatgcagctggtgattttaagttgaagccaatgtccatgtaccattatgaaaatcctagggccattaagaatgatgtgaattctctgcctatgctccataaatggaacaacaaagcctggatgacagcatatctgttcatagcatggtttactggatattttaagcctactgttgagacctactgctcaggaaaaaagattcctctcaaaatattactactcattggcaatgcacgtggtcacccaagagccctgatggagatgtacaaggagattcaggttgttttcatgcttgctaacacatcattcattctgcagtccatggatcaaggagtaacttcgattttcaagtcttatttaagaaatacaggccaggtgcagtggctcacgcctgtaatcccagcactttgagaggccgaggtgggcggatcacagggtcgggagttcaagagcagcctggccagcatagtgaaaccctgtctctaataaaaatgcagaaattggccgggcatggtggtgggcgcctgtagtcccagctacttgggaggctgagcaggagaatcgcttgaacctgcgagtcagaggttgcagtgagccaagatcatgccactgcactccagcctgggcaacatagtgagactgtgtctcaaaaaaaaaaaaaaaacatttcataggctagagctgccatagatagtgatttctctggatgatctgggcaaagtaaacaaaaagccttctggaaatgattcaccattctaaatgtcattaagaacagttgtgattcatgggaggaggttaaaaatatcaacattaacagaaatttggaagaagttgattccaaccctcatgaatgactttgagaggttcaagtcttcagtggaggaaggaactgctgatgtagtggaaatagcaagataactagaattaaaagtgaagcctgcaaatgtggctgaattctgtaatctcatgataagactttaattaatgaggagttgcttcttctggataaacaaagaaagtggtttgtcaagatagaatctactcctgttgaagatactgtaaacactgttgaaatgacaacaaaggatttagaatattacataaacttagttgataaagaagcagccagaattgagaggattgactccaattttgaaagaagttctactgtgggtaaaatgctatcaaacaccatcacatgctacagagaaatattttgtggaaggaagagtcaattgatatgcaaactttattgttgtcttattttaagaaattgccacagccactccaatcttcagcaaccaccacccttattagtcagtaatcatgaacactgaggcaagaacctccaccagagaaaagactatgactcaccgaaggctctgatgattgttcagatttttaagcaacaaagtactttttaactaaggtatttacattttagacaaaatgtcattgcataacactgtatgcaatgtctaatgtaattagacataatgttattgcacatttattagactataatatagtataaacacaacttttatttattattgtttttctttttagacgaactctttgctctgtcgcccaagctggagtgcagtagcaatcttggctcactgcaatatgcacctcctgggttccagcgattctcctgcctaagccactttggtagcagggattacaggcatgttgccaccatgcccggctaatttttgtatttttagtagagacggggtttcaccatgttggccaagttggtctcgaactcccaacctcaggtgatccacctgcctcggcctcacaaattgctaagattacaggtgtgagccactgcacccggccttaaacataacttatatatgcactgggaaaccaaaaaccttgtgtgattcactttgttgcaatattcactttactgaagtggtctagaactgaacctgcaatatttccaaggtatgcctgtagttgtgagatgtcagtgttttacttgaagtgttaaaacattgattttaagttgactgttaaaattaggtatgtgtattattatccctagatcaacagctaaaaaaaaaaaaccacaaaagatatagacaaccaatatattaaattggaatataaaacatattcaaataatccaaaatataacaggaaaggggacattgagaggcaaaaaaatggaggagacaagcagaaaaataacaaattgtagaccaaaatccactcttatcaataactacattaaatgtaaatggtctttaaaaatgtaaatggtctaaacacaccaattaaaagacaaagatggctgggtgcggtggctcacgcctgcaatcccagcactttgggaggccgaggtgggctgatcacctgaggtcaggagttcaagaccagcctggccaacatggtgaaaccccacctctactaaaaatacaaaaattagccgggcaaggtggtgcatgcctgtaatcccagctactcgggaggctgaggcatgagaatcgcttgaacctgggaggcggaggttgcagtgcactgagatcatgccattgcattccagcctgggcggcagagcaagattccatttcaaaaaaaaaagacaaagatcatcagattggaaaaagaaaaaaacaagacccaactatatgctattacattttattttatttttacttctcaaatgttaaggaaacctattttaaatataaagatataaatatagggaaattacataatgataaaagggtcaattcaccaagaagataaacactgaaatataatatgcaactaacaaagatccaaaataaatgaagcaaaaattgatagaactaaaagagatatggaaaaatccacagtcataactgggagactcaataagtccattctcaatgactgataaacaaatagatggaaatcaaaaaggatatatcaaacctggataacgttatcaactggtttaatataatggacatttacaaaaaacactctacccaagaacaacagaatacatattctttccaagtgcccacagaacatatacccagatagatcatattctgggtcataaaataaactaacaatttttaataaaaccacataaagcatgttctctggctataccaaaattaaacaagaaataaataatagaaaactcccccagcctaaccaacatggtgaaaccccgtctctactaacaatacaaaaattagctgggcatcgtggcgggtgcctataatcccagctactcgggaggctgaggcaggagaattgcttgaacctgggaggtggaggctgcagtgagctgagatcacgtcattgcattccagtccaggtggtagagcaagattccatttccaaaaaaaaaaaaaagacaaagattatcggattggaaaaagaaaaaaacaagacccgactatatgctatcagcaagaaagctattttattttatttttacttctcaaatgtcttatggtttaaggaaatctattttaaatataaagatataaatatagggaagttacataatgataaaagggtcaattcaccaagaagataaacactgaaatatagtatgcaactaacaaagatccaaaataaatgaagcaaaaattgatagaactaaaagagacatggaaaaatccacagtcataactgggagacttcaataactctgttctcaataactgataaacaaatagatggaaatcaaaaaggatatataaaacctggataacattatcaactggtttaatataacggacatttataaaacactctactcaagagcaacagaatacatattctttccaagtgcccacagaacatatacccagatagatcatattctgggtcataaagtaaactttaacaatttttaataaattaaaaccacacaaggccgggcgtggtggctcacacttgtaatcccagcactttaggaggctgaggcagtggatcacctcaggtcgggagttcaagaccagcctgaccaacatggtgaaaccccatctccactaaaaatacaaaactagccgtgcatggtggcacatgcctgtaatcccagctactcgggaggctgaggcaggagaaccgcttgaacccaggaggcagaggttgtggtgagccgagatcatccacataaatggtgttctctggctataccaaaattaaataagaaatcaataatagaaaactcccccagcctgaccaacatggcaaaaccctgtctctactaaaaatacaaaatgtcattgcataacattgtatgcaatgtctaatgttattagacataatgttattgcacatttattagactataatatagtataaacataacttttatttattattgtttttctttttagacgaactcttgggcgtgatagtgcgcgcctgtaatctcagctattcaggaggctgaggcaggagaattgcttgaatccaggaggtggaggttgcagtgagctgagatcgcaccactgcactccagcctgggtaacagaacaagactctgtctcaaaaaaaaagaaaaaaaagaaaaaaaagagaactctcaaatatttagaaattgttaatatacttctaaataatccatgggtcagagaaaaaatcttaaagtaaatcagaaaatatttgaactgactgaacatcaaaacaaaacatatcaaaatttatgggttgcagctaatgcagcgtgtacaggaacatttatagctttacatgcctatgatagaaaaaagaaaggcctcaaatcatactctaagcttctaccttaagaaactagagaaagaacaaattaaacctaaatcaagcagaagaaaaagaaattagaaaagcagaattcaatgaaattgaaaacagaaaaaaatagagaacaatcaataaaaccaaaagctttgaaaaggtgtacagaattcataaactttttgacagatttaccaaggaaaagaaagagagaagacataaattactaatatcaggaatgaaagaggggatgtcacttcagaccctccagatattaaaaggataataagagaatattacaaacaactctatgctcataagtttgacaacttagaggaaatggaccaatttcttgaaagacacaaattacctaaactcagtccagaagaaacagatcagagaaatagtcctaaatgtactaaagaaaatttaattcatagtttaaaaccttccaatgtagagaagaaaactccaggcccagaaggtttcttttcttttccttccttcctccctccctccctccttccctccctccctccctccttccttccttccttctctcttttctttccttttctcttttcttttctttccttttctttcttttctttgtggcagggactcactcctgttattcaggctggagtacagtggtgcaatcacagctcactgcagccaagacttccacacccagcaaatttttttgtatttttagtagagatgggttttcatcatgttgcccaggctggtctcgaactcctggctcaagcaatctgcctgccttagcttcccaaagtgctgggattacaggcatgcgccaccatgcctggcccccaaatggtttcactgggaaattctaccaaatgttaaagaaagaaatagtatcaattccacacaaactcttccagaaaatcaaaaaaacttagctcattttatgaaggcagcatggtcctgatgccaaaatttgaaaaagataacaagaaaactatagaacaatacttcacatgaacatataccccaaaacttcaacaaactacaaactattagcaaaggaatccagaaatatatatatatttttaaaaaataatacttcactactatgtggagtttatcccaggtaatttaatgctggtgtaacattcaaaaatagccaggcatggtggctcacgcctgtaatcccagcactttgggagggtgaagcgggcagatcacctgaggtcaagagtttgagaccagcctggccaacgtggtgaaaccccgtctctactaaaaatacaaaaattagctgggtatggtggtgtgcactagtagtcccagctacttgggaggctgaggcaggagaattgcttgaacccgggaggtggaagttgcagtgagctgagatcgcaccactgtactccagcttgggggacagagcaagactccatctcaataataataataataataaataaatgagcataattcaccatattggcagactaaggaagaaaaaaacacatgataatcctaactgatgaagaaaatgcattaacaaaatttaaaacccattcatgataaaaaaaaaaaaatctctcagcaaactagagaaggaaacttcgttaatccaaaaatatatatatatattggccgggcgcagtggctcacacctataatcccagcactttgggaggccgaggcaggcggatcacctgaggtccagagttcaagaccagccttaccaacgtggagaaacctcgtctccactaaaaatacaaaattagccgggtgtggtggtgcatgcttgtaatcccagctactcgggaggctgaggcaggagaattgcttgaacctgggaggtggaggttgcagtgagccaagatcatgccattgcactccagcctgggcaacaaggacaaaactctgtctaaatatatatatatatatatatatatatatatatatatgtatatatacacacatatatatgtacatatatacatatatctacatatacatatatacatgtatacatatacatatgtatacatgtatatatgtatatatgtgtatgacctccggtgatcccccccccaacctcggcctcccaaagtgctgggattacaggtgtgagccactgcacttgaccgcaaatcacatttctaacaaaggacttgaatccagaatttattttttaacatttttaaaaaattttattttattttatttttggtagagacaggatttttgtatgttgcccaggctggtctcaaacttctgacctcaagtgatcctcctgctcagcctcccaaagcactaggactacaggcatgagccactgtgcctggcctagaatttataaagaaccctcagtagggcgcagtgcctcatgcctgtaatcccagcactttgggaggctgaggcaggcggatcacgaggtcaggagttcaagaccagcctggccaacatagtgaaacctcgtctctactaaaaatacaaaaaaattagccaggcatggtggcaggcacctgtaatcccagctactcaggagaatgaggcaggacaatcacttgaacccgggaggcagaggttgcagtaagccaagatggcgtcactgcagtccagcctgggcaacagtgtgagactctatctcaaaaaaaaaaaaaaaaaaaaaaactctcaaaactcagaaataagaaaacaaacaattttttaaaaaggcaaaagttttgaacaggcacctcaccagagaagatacatggatggcaaataaatatttgaaaatatgctcaacatcatttgttggtagggaattgcaaattaaaaccacagtaaggtatgtctatacacctattgaaattgaaaaaaatccctgacaataccaattgttggtgagaaggcggaacaactgccactctcataaattactggtgggaaaacaaaatgatacagcccctctaggtttcttataaagttaaacacacacttaccataggctccaacaatccctcctagaaattagcccaagtaaaatgaaaatttatgttcataccaaaacctgtacgtgaatgtttacagaagctttattcataattgccaaaactagaaacaacctaaatattcctcaactgggaagtggagtaacaaactgtggtacatccatacaatacactactactcagcaatgaaaaggaattgactactgatacactcaacaacatggatgaatcttaaatccattatgccaagtgaaagaagccaaattcaaaatacaacatattgtatggttccattttatatgacagtctggaaaagaaaaaactataggaatagagaacatatcagtgttgccagggcttaagggtagggaaggctttgactacaaaggggtaacaaaagggaatttgggaaggtgattaactgttttatttttttgtttgtgtgtggtggtgtttacataattctttgcatttgtcaaaactcacagaactctacaccaaaatgtaaattttactgaatgtaaattacaattaaattatatgtatgcaaatctattatgtgtatgtttgtgtatatatatatatatatatatacacatatgaatatttttaaaagctttttcccctcatattactatcaagtcatatctcacagattttgtatttgtacaattattctttcttgagcctgaaattagttaggactgttttgttttgtttttttcttgagatggagtcttactctgttgcccaggctggagtacagtggtatgatctcggctcactgcaacctctgcctcccaagttcaagtgattctctggcctcagcctcccgagtagctgagactacaggcgctcaccaccacacctggctaattttcatatttttagtagagacggggtttctccatgttggtcaggctggtctcgaactcctgacctcaggtgatctgcctgccttggcctcccaaagtgctgggattacaggtgtgagccaccacgcccggtcaagttaggactgtcttcatctctgttaaccttccatttcctctccttccacaaaacctaaactttattattatttgaaacataatttttgagtaagttattccgtctcaagaaggtccaattcgtgttattgagaatggtaaaataatacactacctgccctgggcactttagtgagaatccatttattgggttaactagcagtgactgtggatggcagtgagcaggcctgggagtggccaggacataggacagatgtgctttgatgggagagaagggaaggaaaagccggcagcacagcgatgggaaactagaggccagaggtagaggtggagggcaatgatcagggagcagagatgacagcatgccaaggacatcctgtgctgacttcacaggctggctctgggcataggccagtctcttcctggagctttcattttctctcttcggaatctgtcaactctctactgcaatctgttccacagtcgtatagccaaaatcctcttgctctgtgtctgtttattcaacaaatatttatcttaactgactctaatcacattgtctcctgtttgtcctgcagtgaagcccttttacatctgcttatctcttttgatccaagggaaggagacttaaccctgacttccagagaaggaaatagtctcagaaaggttaagtcatttatctgaagttgcccttttaatactgagtactggactctctcagtatccgcgtactctgctgccccctaccgtgaacatagcaataggttttaaatcacaaaaacacacagcagaacactacacaacactggaaagactacgacactataaatagtgcttacatttgttcatttagcaaatattcagctggacgtggtggctcacgcctgtaatcccagcactttgggaggccgaggcaggtggatcacttgaggccaggagttcaagaccagcctggccaacatggtgaaaccccacctctaaaaatactaaaattagccgggcatggtggcacgcacctgtaataccagctactcgggaggctgaggcaggagaattgcttgaatccaggaggcggaggctgtagtgagccgagatcacaccactgcactccagcctgggtgatacagcaagactccatccccaaaaaataaataaacaaatattaattgagagcctactatatgccagaaataagcaggtattgtccttgtgttcatggagcttatggtgtagagggggagacagaattacacaaaataattacttaattacagtttgaataaatactatgaagtacaaggtgctatatgagggtatagaataagggtatgtagcctggtctggaggcttagggaaatcttacatgaagtagaattcataggaataaattattggttggctatgggggaggttaaagagacatcaagaatgccttccaggtctctggcatgaacaactgggcagatagagcactgttactaagcaggggaagcctagaggaggaagacattatgaatggaaagaatatgaacttggctttggctttttgcagttcgggaatcccacgagacattaaggtatagatgtggaataagcaatcagattcaggagtttgggagcaaggtctatgctagaaatagaaagttgggagttgttgggatacagattatatttgaaactgtggtcatggatgacatttcttagaaaataatagaaagagtagaaggcttataacttccctgagaaactccagaatttaaaaggtcaactggaagagatggagctagcaaaaacttaggacaaggggccaaggaggggaaaatcaggaatgtgcaatgatgccaaagtcaggggaagtgtatttcaaaaagaagactggtcaaccatggtggtaattacaaagaaatcaagtgcaatgactttcttggtctacgatgatttttttggtctgcctagtgaaacagattcagtttcagaggactagaggtggagaagactaggccactacctcttagaaaacctcctaaaggccaccatagcctatggtcttgaaccagtggtcttcatagtcttttgctcacataccacttaaaataattttgataaataatgtgagctgggcacagcggctcaagcctgtaatccaaatgttttgggaggctgagtctggaggatcactggaccccaggagtttgagaccaacctgggcaacatagagaaactccatctctacaaaaattaaaaaattagccaggtgtggtggtgtgtgtctgtagtcctagctatttgggaggctgaggtgggagaattgcttgagcccaggagttcaaggctgcagtgagctataatcatgccactatacttctacctgggcaacagagcaagaccctatctctaagaaaataaataaataaaatttttaaaaaacattaggccaagtgcagtgactcatacctgtaatatcaacactttgggaggccaagatgggagaactgtttgagcttaggaattgaggaccagcctgggcaatatagtatgacctcatctctatgaaaaatttttaaaaattaggtgggtgtggtggcacacgcctgtagtctcagctacttgggaggctgaggcgggaggatcacttgaactcaggagattgaggctgcagtaagctacggttgcgccactgcactccagcctgggcaacagagcgagaccctgtctcaaaacaaacaaacaaaaatatagacatatttttaaaagataatagaaggctattttctgaatcttgtatttttaactgtccccagttctgaacttttttttaattgccccgtgcaatgtatcattcagggtgggtcagatatatgcctttctttcttttcttttttccatttttttttttttctctgagatggagtctcactcttgcccaggctagagagcaatggtgtgatctcggctcactgcaacctccacctccagggttcaagcgattctcctgcctcagcctccccagtagctgcgattactggcacgtgccactgtgcctgactaatttttgtatttttagtagagacagggtttcaccatgttggccaggctggtcttgaagtcctgacctcaggtgatccactcacctctgcctcccaaagtgctgggattacaggcgtgagccaccatgcctggcctttcttatgaagactagcagaactacaattatgaagaaaaagtcggcttggagcctcaaccccaggaactttctcaggtggagtacatctggaagttgaggatctggaaatgaatttccttaaatatatccatgcatgagtaccgcttaccaagccttcatttactttacggctattgcataccccatttgaaaaccagtgttgcaaaggactgggggcaatctgaaactactgggttcctggaacctggcactgattgatggggccagtgggccctaatgagattgcacctccattttaaaagcgtgaaaggtataaggagattcagagataggtgtaaatggcttgcgggagcctccaaaattttcaggtccaggtacctcccaccccttcaagggactgtctgatactattctatggctcctggaatgaagaaccagtcatcaggacctgctggcctctattaaattaagagtccagtcagatttaacaacctgaagatgaggtgtaactgtgaagcaatatatggctgattttttaacacacccatccaaatacatccactccagctgattcattctctcaactcccatgtgctaggtaatgtatgaggtgccagagttacccaaaaaacaaacaaagcacaatccataggccaagtcctgcagaaactctaggagagaaacttttaaagaaataattataaaaacactgtgatcggctgggcgtggtggctcacgcctgtaatatcagcactttggaaggctgaggcaggaggatcacccgagatcaggagtttgagaccagcctggccaacatggtgaaacaccatctctactaaaaatataaaaaaattagctgggtgtggtggctcacaactgtaatcccagctacttgggagactgagagcaggagaattgcttgaacctaggaggcagaggttgtagtgagccaagatcatgccactgcactccagcctgggttacaagagtgaaactctgtctcaagaaaaaaaaaaacaaacactgtgataaagagttaataaaactatgtgcaagagctaggggagtactgaagaaagagtgatttgagtaagaactttgtaagactttgagtaagaactttttaagactttgggaaaacttcccaaaggaggtcacattagagttatttattggcaggcgtgtagtacatcatagagaaaaagagatggcagtggaaggatgttccaggcagaggatgcagcatgtcacatgggcagccagtgtccaagtgacactcaaggggcaagacctgcttcatggacttgtgacctctgtagtcacacagggcccccctcttagaagggccctcacgcttgttttaatgttctgctgtcatcattttgaaattcttattttttttttaacaaggagacttgcattttcatttttgcactgggccctgcaaattacgtagcaggtcctgcaagagggcaagatgaaggcagggagacctgctgggaagttattactgcggtccaagtaagagataatgaaggggctaaatcaaggtcttgtcgtaacagtaatacacagccacaccattttcaacttcttcccagtgtattcctcagtttagatgtagcaatttccccaactggaaagtacttaggttgattttggtgttttgtaattacaaagaatgaggcaattgaataatttgctacaaataattttgtgtttgcacctatgcaaggatatctatctaggataaattctcagaattagaattgatgggtcaaaggtatgctcattttcaaggttgataggcattgccagttggtgacctgaagagagtaaaccaatttgtatctcttccaacagtatggaggagtatctgttttatcatgccctctttaacactctgtagtatccaaccttttggtatttgcagtctgataatgttaagaaagcagtggctgattgtcttaatttgcctttctttaattacaaacatggttggtcatttaaaaaattattataggagtctgttcaggccaggcacagtggctcacgcccataatcccagcactttgggaggccgaggcagatggatcacttgaggccaagagttccagatcagcctggccaacacggcaaaaccgcgtctctacaaaaaacacaaaaaaattagtcaggtatggtggcatgtgcctgtagtcccagctacttgggaggctgagacatgagaatcgcttgaaccaaggaagcagaggttgcagtgagttaagatcgtgccactgcactccatcctgggtaacggagcgagactgtctcaaaaaaaaaaaagagtccatttatatttctgtttgcatgaagcccatttagtccttcgccattattgaattgggtcataggtctttttcttattggtttataacagctgttttacgttaaaaaaataataataaatattttacctagtttatagtttgttgctttatttctgctttttttttggccatgcagatgaaggcctgaatttttgaaacctaagtgaactgttactgctttcactgtataccagtattttgcaatataagccctcttttcagggagtggcctttagagactattacacttatttttttagaagctcagcttgttcatttggagaacatacaatattaaagggaaaaaatgctcagcttgtacttattttttgaagagataatatatccacatgattaaaaagtcaaaagatacaaaaaggtatacagtgagaaaaatctccttccagccaggcatggtggctcccacctgtaatcccagcacttttgggaggccaaggcaggcggatcacatgaggccaggagttcgagaccagcctgcccaacatggtgaaacactgtctctactaaaaatataaaaaatagctgggctttgtggtgtttgcctgtagttctagctacttcggaggctgaggcaagagaattgctccaacccaggaggcagaggtttcggtgagccgagactgtgccactgcactccagcctgggtaacagagcgtgactccatctcaaaaaaataaaataaaataattaaaaaaaattaaaaaataaaaataaaaattgccttcccaccctgtcctcaaaccacttaagcttccctccaggaagtaagcactattatcagttccttgggtatctgtccctattttatgtgtaaatgagcaagtgcatgcacacacatgtattcttttttccgattattacacaaatagtagcctacaatatccaggattctgcacctttgccttttttttaccacttaacattacattttggaaataatgtcctaattattcataaattcgtaagtacttcctcattttaaaaaatggctgcattgggccgggcgcggtggctcacgcctgtaatcccagcactttgggagtccaaggcgggtggatcacaaggtcaggagatcgagaccatcctggctatcacggtgaaaccctgcctctactaaaaaaatacaaaaaaattagctaggcgtggtggtgggcgcctgtaatcccagctactcgggaggctgaggcaggagaattgcttgaacccaggaggtggaggttgcagtgagccgagatcgcgccactgcactccagcctgggcgacagagcgaaactccatctcaaaaaaaaaaaaaaaaaattacaaaaggctgcatagtgtcccattgtatgcattggtttgaatatgcttttaagggagaaacctgagtaagaaatactctcaagtcatttggggctggacattgagactgagtcgggggattggactgggaccttctctagatcctgaacaatcagaccttttccttcctccaggcctttacctcccattttctttttctttttttttttttttttgagatggagtctcactctgtagcccaggctgaagtgcagtggcaccatctcagctcactgcaacctctgtctcctgggttcaagagattctcctgcctcggcctcctgagtagctgggattacaggcacgcgccaccaagccaggctaatttttttgtgtttttagtagaaacggggtttcacccatgttggtcaggctggtctcaaactcctgacctcaagtgatccacccgcctcagcctcccaaaggtgctgggattacgggcgtgagccacagcgcccggccttttaccctccattttctgccaattaaaacttcacacagtcttccattgcttgtaacttttgaacacgtgtgtggtaatgttctgtgtatattgcatataaaactattagcttttaaaatattaccagtttatatagactcatctcaaatgctacttccttttggaaaccttccttgatctccctgatatccccagccagagtgacctcactcccctctgaaatcctatagaatggtgtaatgttttgtggttatttgtcacgccttttatgtgcacaagtcttatcttttttttttttttaacctgaagacggcctcacttgccccagtaccttccacagagtggcttctgagtaatgtttacagaatttttgaggtaattaatgaatgaacaaaggcaccaagggttaaggacatgaatttagtgtcagacacttgggttctactcctggttttgctgttttttaggtgtgtcgtggggtaggtcacttctctcaccctttccttagaatccacttcacaggacagtggtgaggattaagtgatttgatgtaggtaaattgcttttcattgactgttagctgctgaaataggaattcagaggaaggaggagagaggtcaaggagacttcctaagctggactgtgctctccagccaccctctcatttatatttcctttcagatctctactaagaatgtcactctggccgggcgcagtggctcactcctgtaatcccagcactttgggaggccgaggcaggaggatcacttgaggttgggagttcgagaccagcatgaccaacatggaaaaaccccgtctctactaaaaatacaaaattagccaggcgtggtggtgcatgtctgtaatcccagctactcgggaggctgaggcaggagaatcacttgaacccgggaggcaggggttgcggtgagccgagatcacaccattgcactccagcctgggctacaagagcgaaactctgtctcaaataaataaataaataaaacaaaataaaaaataaagaatgtcactcttccttgttcctgcattttctttttatgtctttatcttttgggtaaatttgcctggcttcagggcgaaggccctccagcaccaagagctgcctagtactgcagattcttacgaccactcaaatctttctttcctttataagaaacaagcaactctaccctatggttgagccaatgtgtcagtttcttcctatccaaatggatggcatcctgacatctgcagtgagaggccaatgcaatttggtgggggtaggggcaagggtgggggagttttgcagagcataaagagcacagtatcttggatcttcagcagcttgagttcagttcttaacttttcttgcctcattacaacagtgtcacaacccattttcctcatacattgagaactgctgcagtcaggcacggtgactgttacatggctgttatattggccatggatggccaacatagtgagacctccattttaaaaaaaaaattaaaattagtcaggcatgatgacacgtacccgtagtcatagctactcaggagactgaggtgggaggatcgctcgagcccaggagtttgaggttgcagtgagctatgatcatgccagtgcactccagcctgggtgacagagtgagatcctgtctctaaaaaaataaaaataattagaaagaatatgattggaaaaaaataaaaatacaagtaaaaataaaaaagaactcttgtgaggaaagcatctaacaatgctagacaaaaagtaagtaaccaacaaatgcaagttctccctttaagctcttctccacactggtaccagatttgtactgctaaaagtcctgttctttcctcttattatggaggaattatcctagctcatagccaacctcctcactcatatacatgcttactcaagggcatggcttcagcagttctcctctctctcctgcatcatcaatttttccctctctcctggatcagtctcaatcaacatacaaatgttatgtttcccatcttaaaaacaaacaaaaagtctgttttgactccactaccaactacagctgccacattttctccttcttctttgtagtaaaacttcttgaaaaagctataacctgtatactcaacattttcaattcctcttgaacctactccaatcagatttttgtcccatacactccaccaaaacatctcaagatcaccaacaacctccacattggtaaatctaattaccttctattcatcttcatattatttgatctgtgtgacacagttgattactctctctttcttaaaacattttattcacttggcttccgggagttctcactttcctggttttcttctttttggctcttccttctcagtgtctttggctgattcctcttcattttcccaacctctaagtattagagttgccccaggatccagtcattggaactctttgcttttctgtctacactcatttcctaagtaatttcttcagtcccttgggttttacatattatattgattctgaaaacctccaaattcccacttcactctcaaccttcttcctgaactcaggtccaaatatcaaaatagcctacttaccacatccacttgggtgagctcttcatatttctactcaaacctgtccctcctgcagtcttctttgtgtcaaataatggcaactccattcttctagttgctcaggtcaaaaagtttggtaattggtgaacacgccgtccacgtgcgccttgctgtctctccattatcgcttgagatctccagccttaccgcggcttgaaatggaccccaactgctcctgcaccactggtggctcctgcacgtgcgccggctcctgcaagtgcaaagagtgcaaatgcacctcctgcaagaagagctgctgctcctgctgccccatgggctgtgccaagtgtgcccagggctgtgtctgcaaaggggcgtgcagctgctgtgtctgatgtggggacagctcttctcccagatgttaatagaacaacctgcacaacctggttttttttccttaatacaaccctgagccatttgctgcatttcttttcatattaaatatgtgaatgacaataaaacaattttgacttgaaaaaaaagtttggtaattggtaatgtgactctccgctttgtctcatacctcctatccaatccattaacaaattctgccaactctactttcaaaatctatgattccaaaaaaatccaaaaaaagtgtaaagggaaaaaatacaaaatacaaaaaacaaaaaattaaaaatcaaagtctatgagaatccaactacatctctgtatctctacttggacccaggtctgagccgccatcatcttgtacttggattattgtaatagcctcctaactggcctttctgatatggtcttaaaaccttttctcagcccagcaaccaaagtaattctgttaaaacataagccagaagatgtctcttccactctcagaacctctcatcagtttttgttaagagacagggtctcactcttgctcaggctggagtgcaatgcaatgatgatcacatagtttacgacattctcaaagtcccatgctcaagcaatcctctcacctcagcctcccaagtagccaggactacaggtgtaccccaccattcctgggtaatttttttttgtttttggtagagatggtgtcttgaactcctggcctcaagtgatgagtgagagtatcaggagatgacagatgatgatcaggtgagaggatcaagagactgtcctacctcagtctcccaaagtgctgggattacaggcatgagccaccatgcccagccccatcagttttttatctcatgtagaccacccttccctccataaccttcatctcctgatactctcactctcttccactctaaccacagtgattcttacccttttcctcaaacctaccaggcacgttcttgcctcaaaacttttgcatttgctgttccgtctgcctggattcatttctttcagatatctacatggttcactcccttgttcctccagatctttacaaaaaactcacttttttactgaggccttccctggccactccatccaaaaattttttttttttctctctctctctctctctcacacacacacacacaccattcagatttcaagtcctaaatcctgcttttctcaacagaaaaaaaatgctatttaactacatatatatatttaaatcattttgttcgttgtctatcaccccagtttttttgtttgtttgtttttgttttgttttgttttgttttttcttttgagacagagtctcactctgtcacccaggctggaatgtagtggtgcgatctcagctcactgcaacctccacttcccgggttcaagtgattctcgtgcctcagcctcctgagtacctgggatgacagatgtgcaccaccatgcccagctaatttttgtgttttttagtagagatggggtttcaccatgttagccaggctggtcttgaactcccaacttcaggtgatctgcccaccttggcctcccaaagtgctgggattacaggtgtgagccaccatgcccggcctgctccattataatttaagttccatgaaagcaggaagtgttattagatttgttcaaagctctatcatcccagtaccgagaataatgttcaacacaaaataggtgtttcacataagtatttgttgaacttgtttcttgagtgaaatcaaacgttatcattttgctcctctgttttgggtcattctgcccagaacagagtactcatgccttttggtctcaggaccctctctacactcaaagtattgagggccagacacagtggttcattcctgtagtctctggtacttgaaaggctcaggtgggaggatcacctgagctcaggagtttgaggttgcagtgagctatgattgtgccactgcactgtagcctgggcgacagggtgagaccctgtctcaaaaaaaaaaaaaacacaaaaacattcaggctgggcttggtagctcatgcctgtaatctcagcactctgggaggccgaggcaggcagatcatgaggtcaggagttcaagaccagcctggccaacatagtgaaaccccatctctactaaaaatacaaaaaattagccaagtgtggtggctggcacctattacgtaatcccggctacttgggaggctgaggcaggagaatcgcttgaacctgggaggcagaggttgcagtgagccaagatttcgccactgcactccagcacgggaaatagtgcgagactctgtctcaaaaaaaaaaaaaaaaaaatttcaggactccaaataacttttgaaaattcaggactccaaataacttttgtttatgtggattctgtctattgataagtatcacactagggatcaaaactgagaaattgttaaatatttacatactaattcatttaaaataacaataataaacatgttaacataacatttttatttttaaaaaaataataaaaatttagctgttttgttccaaaacgaaacaaaaaaaatagtgagaggaatgctactgttttgcttttttgaaaatctgttttatgtctggtttaatagaagataattgtattatcctatttacttctcattcaatctgtataatgtgccatgaagccctggaaaactacccagtactctcatgagaaaatgagagtttaaaaagaaaacaatgtcttcgtattattatgtaaatggttgttgtctccatatatatctgttgtctttgtacatagttttccctcccattctacatagcaaactcctgctggtcactcaaggtctgtctcacctgccatctctagacagtcagttgttccctcctccctactcccatttctctattatagcacatattatgttatcttgttatctggataattgtctatcttcccaaccgactatcttcctaaagaaggcaactataacttgatcttctttacatccctagccccactcacagtatctagcaccaaaaagatatttaataaatattagttgaataaagaaatatgaggccaggtgcagtggctcatgcctgtagttctagcactttgggaggccaaggcaggtggatcacctgacgtcaggagtttgagaccagcctggccaacatggcgaaaccccatctctactaaaaatacaaaaattagccgggcatgttggtgggtgcctataattccagctgctcaggaggctgaggcaggagaaccgcttgaacccaggagacggaggttgcagtgagccgagatcatgccacttcactccagcctgggcaaaagagcaaaactccatctcaaaatatataaataaatatgaaaggaggtgaagggaagaggggacccagtttatctacagtgagctcaggcactgatataacatttcttttttttcttttcttgagacagggtctagctctgttgcccggactggagtgcagtggcataatcacagctaactgtaatctctgcctcctggcctcaagtgatcctctctcctcagcctcccaagtagctgggactacagccatgtgccacaactcccagctaaatttttttttttttttttttttttgtaaagacagagtttcaccatgttgcccaggctggtcttgaactcccgggctcaagtgatccatcctccttggcctcccaaagtggtaggattacaggtgtgaacaactgtgcccagccaatatcataattcttttcttttctttttttttttttcttttttgaaacagagtctcttgtcgcccatgccagggtgcagtggcacaatcttggttcactgcaacatctgcctcccaggttcaagcaattctcctgcctcagcccccaagtagctgggattacaggcgtgcaccaccacgcccggctaagttttgtagagatggggtttcaccatgttggccaggctggtctcgaactccagacctcaggtgatccacctgcctcagcctctcaaagtgctgggattacaggtttgagccactgcgccagccccaatataatatttcttgttaagattatcagtgtcaaaggttttccaacatcacactctggggactgttgtggggtggggggaggggtgagggatagcattaggagatatacctaatgctaaatgacgagttaatgggtacagcacaccagcatggcacatgtatacatatgtaactaacctgcacattgtgcacatgtaccctaaaacttaaagtataataataataataaaaaaagaaagaaaaaaacaaacaaccccattaaaaagtgggcgaaggatatgaacagacacttctcaaaagaagacatttatgcagccaaaaaacacatgaaaaaatgctcatcatcattggccatcagagaaatgcaaatcaaaaccacaatgagataccatctcacaccagttagaatggcaatcattaaaaagtcaggaaacaacaggtgctggagaggatgtggagaaataggaacacctttacactgttggtgggactgtaaactagttcaaccattgtggaagtcagtgtggcgattcctcagggatctagaactagaaataccatttgacccagccatcccattactggctatatacccaaaggactataaatcatgctgctataaagatacgtgcacatgtatgtttattgtggcactattcacaatagcaaagacttggaaccaacccaaatgtccaacaatgatagactggattaagaaaatgtggcacatatacaccatggaatactatgcagccataaaaaaatgatgagttcatgtcctttgtagggacatagatgaaactggaaatcatcattctcagcaaactatcgcaaggacaaaaaaccgaacactgcatgttctcactcataggtgggaattgaacaacagaacacatggacacaggagtgggaacgtcacactccggggactgttgtggggtggggggaggggggagagatagcattaggagatacacctaatgctgaatgacgagttaatgggtgcagtacaccaacatggcacatgtatacatatgtaacaaacctgcacattgtgcacatgtaccctaaaacttaaagtataataataataataataataataataaaaagcttttcctagcagctggtcagtttaccatatagttcattaagtgaattccaaccactcatgtggtctttcaagtgaagtggagaagacagaggtcattcatttcattttatgaggcaaccaaggcccaaataaatgaagtgacttgctgaaaggcataccaaaagtcagtgacagagccagtgcttgaatcaggtatctgacgttaagtcaagtgctgtttccattttatcccatgctcatcatggtgactggaggctgcaaagtcagagttcccgtgattctatcttggggtgttgctctgaaaccttctaaacctcctcttgaactgatttcacagcagtctctggaccgtcctcttactaaggactatcttagggatccattttataagcaaccattgacttctatcagcctcttctttccttatcatcaatacctactgccattcacatccgccatccttgggagctggtcaaggtggaccaccacagtgctatatcatcatcggcagttccacaagcatttggtattagaggaaaggagaagaataagacagagctcagtccagtctgttccccttcattctttgaatatactatttcttctttctggaatatatcccctcccaaaccttccaactttggcagttcattgctctttcctcagtgtttccacaacactttgttctcattcgtgtcataactcatcatgtaaccacaatgatttgtctctatcatctccctaccgggactgtgagctgttcacctcaatggtgttaatacagtcttcagtctctttgatttccctgagactgtcaactccttctctctctctctttttttttagacagagtctcactctgttactgggctggagtgcggtggcgcaatctcagctctctgcaacctctgcctcccaggttcaagcgattctcaggcctcagcctcctcagtagctgggattacaggtgtgcaccactatgcctggctaatttttgtattttttgcagagacagggtttcaccatgttggccaggctggtctcaaactcctggactcatgtaatccgcctgctttggcctcccaaaatgctgggattacaggtgtgagtcaccacgcccagccaactccttccttttctttgaacctctcttcttctttccggtgatactccacaatcctgattcttcagtctttttggacaatctttagattcacttttggcttgacttttctcaggctctgaatatgtatgtctcaggatggaactcttggccttttgctctcttcaactctttgctttcagcttcaactaccgtatttacttgaaggtgtccaaaatatccattctccaccttcttcgagaactcattcccatacccatctcacagatcttgtggtcaccccagtttcagcaagtctaaaaccgagctccttgtcacctccttcaagccagttcctccacatgaggactccgtttctgtgaagatgctaccatccatctttctcgatttgccatcactccaaactcctttccctcttcttgtatgcccattgtctcttaaatctgtctcttttctcacccccatcctagaaaaaaatgggttctgaagtcaaatcgattcagctctatcacttatgaatcacgcaagtttggcaaacttattcagagtcttccacttctttatcctaaattaggggtaataatagcatctatttcatagggtttatctatgaagattaaatgagatatcgtggaggaaagtgcttagcccagtaactagtatgtattaggcactcaataaatgttaattattattgttatccttatttccttatacttagactattacactagtctcctaaccaatctctctgcctcctctggtcattattctctccactgggaggggaactaacatggaatatctattaagtgtcaagcacctcatgctgaaagcaatcttatacagtaatagtagcatcattttataaaaatggaacagagccaagatatgaacataggtctgacgctaaagcctgtgcccttttttcatctccaaattaccacgtaatcataaaatactattttcacacatcatcctgcttaaacacacacatacacacacacacaccacacacacacaacctttaatgaccaccctcccccattttccttcagaacacaacccaaatttattatcctagcattcactgtcttgtacaacttccctcacttcccaacactttcctataggaaccctgtgctccagagaaacttatctgccgcctcaggcacatcctgtacaccctcaacttcctccctgaaatgccctctcctctcccctcccctggtttaaatccagcctttccttcaggtcctagctagagtcccaccctcctccattacactttttcctaacttccccagcccctcatcaggtctccctcgacccctggagcagccgcctgtatccttgttgacacgtggtgtttgccattctgtttttctttgcgtttatgttttctcatcaagctgtaaacctctgcactccaggaaatcggccttctcttttttgtttttgtttttgggtgtttttttttttcctttcagcatcccaagtagcccagagccctacaaatagaaagcgcttgataaatatgggttgttttggatgaaagatgatcttcccagctggatgagctctttccctctaggggtgagggactgagcttcacctcaacttcacctaatgtctcacaggaatgccccctcttaaacgctcctcaggtcttctctacccctttcccccaccaccccggcccaggagagccactcagagctccctctccggagtcaccctctcagacccagggctatttctttagcttgctctcgaaccccgcctttaccccagagccgctcctcagtctcctcccccaggctgcctctcaggccccctctcctccaatgccactccctaggaccctctccccagggttccggacccccaaccccggatatgttcccccagggccatccagttgttctacctccaggattactgatttagcctcttccccctcctgctcagggctacccccagaccccgacctccagttccaccccttcggaccctgcctctagaactgttcttttagcctctgcaaccccctccccagcgccgctccgcggcccctgccccagggctggtcggggagccactgccctcgcaggtcccgcccgggtgctgcccccgcgcccccggccgccccccaccggggcggggcgcgcggaggcgggggcgcgctggcggccgaggcggcggcggcggcggcgaaggcaggcgggccgggcgcgggccccgccgccgggatgccgaggagccggggcggccgcgccgcgccggggccgccgccgccgccgccgccgccgggccaggccccgcgctggagccgctggcgggtccctgggcggctgctgctgctgctgctgcccgcgctctgctgcctcccgggcgccgcgcgggcggcggcggcggcggcgggggcagggaaccgggcagcggtggcggtggcggtggcgcgggcggacgaggcggaggcgcccttcgccgggcaggtggggctggcgcgcggggccggggcgcgggctcggggcatccgggcagggcggggggcggcaccggggacgggcctgggccgggccgcacctactgccgaggtcgcggaggcggcgcgccgggggtccgcgccttgggtccgggctggcgcggcccagggcgggggctggggagggcctcgccgagggccgccgaggccgggagctgcttcagcaccgcggacaggggcagcgggcgggggccgagcacgagggtcgggtttgttgtgttggcagtggggtgtgtggcctgcatgactatgtgcgagggaaaccgtacaacgcctcggagtaaatagtaagcgcagccagtctgttgtgggttgggagaagaaaccgaggatgttcaagctggagaagggggagggggagggcggaggaaggactcgatcactgtcttcgtagctgaagggctgtcaggtggaggtaggatagacttgttctagcttggccccacagggcagaactagggccagcgggagtgggggttgcaagaagacaaatttgggctcgatataggaagaagtttgtaacaattggagctgctcaaccagcttaggaggcggcgagctgctcatcactggcatgtgcaagtaaaagctctcggaggggattggatggaggcatgcataatgcttgcatggatgcatacatcatcatcacaataatgccagctagcatttactgaacactcactatgtgccaggcctggtgctatgttttatacgaattatccaattcaatcctcataactactctatgaaatagctgcaattattatccccattttacagatggggatacagactcaaagagcttaagtaacttgcccaaggtcacacagctagtgagtgatggaattggaattctaacctaggcaggctgactctagtctccccttatttacccatgaccttatcctatatctcatggggggtgcagttggactaatttctctagtatcttccaacctagaggactgcaatattctaataaatgatgttgggacaatggtgttttgctgaggaaaatcagagtgatagcctcgccaccctaagagatggagtatatttgttgaagcaggcagtctgtttgtttagaagaatctgcctcaagagatattcttaattgggcatggagctcagggggtcatacgtgcactgaaattgcgtacaaatttgtaagtgcaaatgtgtgtatttctaggcgaggacccctagatttcttcagcctctcaaagggttacaggttccacaaaacaacaaaaaagatatggtgtgtaaaagaacctttagtgccagttggcagttgtcctccaaagattttataattgctggttgacttgttgtggaaactttgcttagcctctttgtgttttcacatgtgttttatcacatgttaaagtaatgcatttcctaagtttataccctagaagaaagattgctttagactgcctgagtgcacaggatgaggtggaaagaccctggcctgggattaaggaggcctgggctctgatctgaccttggcccccattggtttgtgtgaccttgagccatttccttgccctctctaggcttgaatttcaccatgtctaacataaagagatagagctagacaatctcaactctgaaacttttttattcctacaatatttcaagcattaagaggaagctagtccttacctgtatcagttttataggctttgattattccacctcttagcctttgtctttttaaacttaagtttccccctatgacacgagacccctagaatagccacactcattctctgggtcattttagttgtccttttctagataccttttggccctaattttcaatagatgtcaacttgaccattgtctccagatacaggaccctacggttttgcataaaggaaggttggtttcttctttgctctcctggtcccatcctgcttcccccttccctctgtcagctttcctgatctcaacacactaggccactgcctttagggaacaatctataatagctcccggagccttttcctgggtcaaaactgatagcctggaacacaacaccctgtatgtggattatttttatcggagtgcattaccttacatttctccaccttgacgtttgtctgccatcttgcattgcactcagtaacttccttcaagcattcgctcactctctctctcccttcctccacctcttcctccttccttctcttttggcatagcatttccctgtctgaaagggcttaatatgatctgaagtcttgaaattttcactttgctatatttcttctggatcacttataaaaaatttaagtgagacaggtcccagcatggtctcttggggccccctgcactcttaatcccctttcattcacggaagtgaccatttatatctatctattgttttctaagtgacaaaaacatcatccttaatttgacaatgactccattttaaatgtctaatacattgtccaaaacttcctgaaagatagacaaattatatccactgcttctctcaataatttgtgcctaattatcctttcactgaacactaggggatcacttgattgacaccttatagaaatattgttgcttttaagccggcagataatattgcttactcctctttctgtcttttaagccctctggagtctgtctccaccctacccctccattagcaggccatatttcccactgcttattgataacgcatccttactcgacaagctcatctctcctttacccttagacaggctgcccatatttctctggacattgtcacatagttacttctgcacccctacccgttcatttgaaacctttccttaaagtttcagctcaagccctgcttctccaataaactttccctgatttctctagttgtcattttcttctctcttctccaggaaacatttttaaggcagccccagccagtttgtcatttatttatttacttatttttatttattttatttatttatttttgagacagagtctcactctgttgcccaggctggagtgcagtggggtgatctcggctcactgcaacctccgcctcccaggttcaagcgattctcctgcctcagcctcctgagtaactgggattacaggcatgcaccaccacgcccggttaatttttgtatttttagtagagaagggttttcgccgtattggccaggctggtctcaaactcgtgacctcaagtgatccaccttcctcagcctcccaaagtgctgggattataggtgtgagccaccgtgcccagccctatttattttttaatagttaaacattatttttggggagaggaaggttggttcttaggcaaggctttcttgaccaaaatgttttatttttttacattgaacaaaatccctgattctcaatgctcatcattaagtattcaatgagcaatcaatgattctactctttatcctttatctcaaaaagttacatggatctgaaataggcactcatgggcatggggctccaagcccccttctaaaacccttcttagagatgggactcattgccaacttgtactttcttcggtagaaatcaagcctattccttttggcagtggttccacaagctcacccttgagttccttcagaactctttaggtagtcttctaatggtagtggcatcaatagaaagaaattgagagataaccgtgaccttagagatcacccagtacctactacagcacttactagatacttctttaattgagttgcccaagggcacagaacgtgatagtagatgattcggaactactgtagaacttttcctagttctcctgatttctaaattgaaagcatttttcatcatcattgatttttcatttcgtatctatgatctttcattaccaagccaaaaaatttttttattcagtctatcttctcctttgctttatttttctccacaccccacaacccccgaccccttgaagctcaacaaacaggatcctatgctttctttagtctttcttttttatcttacacatcaagaggtcccactgattctctaactggcttccttcatttgatttattaaaagcaccacttctcttatttgctgagtagaatgctcctcaaatacttttctggccttcctagtttccaacttgattctgaggaagatcagaacaggatgaaagagacaagtcaattatcacaggccacatgaataagtaacagagtgtgactcctagacccaggacttatggattcctgcccttgagactggttttgagtggtttgtgctgaggagatggagaacagtctttggtttgaaactgtagtcaaggaagattgaccccgaatgattggaggggtaagagagtgacctactaagaagcaccaacgtattcccaaatcaaaatattctttcactgtgatcatggcctccagtatatcttcattcttgtctggaaaaaaaaaactcactattaggaagttttcccttttacataagctggatctagtctactgtatttttaattcattttctcttatttttactgtggggtttcatattactttaatagctgtttatatttgtaaggtgctttgcacttcccatatgccatgtatgtggccctatttggtcctgggaacaataccatgaggtagataaggaagacattgtcctcattttataggtgagtaaaaggagactcaaagatgatgtgaattgcctatcatcttgtctaaggacccacacatagctcataaacattaaagcaggccaggcatggtggctcacacctgtaatcccagcactttgggaggccgaggcaggtggatcacctgaggtcaggagtttgagactagcctggccaacatggtgaaaccccatctctactaaaaatacaaaaattagctgagcctggtggtgcatgcctgtaatcccagctgctgaggcaggagaattgcttgaaccccgggggcagaggttgtagtgagccaagactgtgccacttcactccagcctgggcaaaagagtgaatctccgtctcagaagaaaaaaagaaattaaagcaaataacagaagctaggttttctgttcttgggctcagcactctgcccactatacaagtttcctgttctggattattattgtagccttttagccagtcttttctactttcaagtatgtcctactctggtccttgaaagaggtatttttagaactaataaaagtaaattataattgtacccaaaagactaatcttaggaaatgcctagccctatagtatggtattgtttgaactcaaaacaggaagaacaaaccacagccaatatctcctcagtacctagcacagtgcatgatacattctggacatgtgataaatattttaaaattaattttgttatctaatccccatcaacttctttgaatagtgcttggcacacaaaagtcgctaccttttgtgaagaataaatgaatgcatgctagaggtataacaaggtgccgggaagcaccgaagagggaggagatgaggttccccagttgaggttcgggaagccagagaatgcttcaggaagaaggtggtatctgagatgaacctttgagggaggagaatgatggagaagggtgagtggggcagtccaggcagaataaaaaatatgaaccatggctccacaaaaatgcatggcatgtttaggaaacagtggataatttgatgtgcctgaatcatcaagttacttgctgtttccagtaagagtgtataaggagaagaggctggagagggagactgagagcagattgtgcatttggcttttgtccaaaggctgaggggagtcattaaaggtttctgagcagaggagcgacctgctcagagccatgttgaggaagtggagggactggagtttgttcctgagttgttctggctgctggctcctgccctgaatgcttttaagctttcttagcacaacttaggggcgagtactcattttagggctcaagtgacccgcccaccttggcctcccaaagggcttacaggcatgagccctggccttgcctgttagcagtaatttaaagactcaattctatgccacaaacacttacgaggcataaagggcaccaaaagtacttggccagaaagtcaggagttgttctttactcctttctctctttatacatatgtatgtataaagatcatttgaggccaggagttcgagaccagcctggccaacatggtgaaaccctatctctattaaaaatacaaaaaaattagctatgcatggtggtacatgcctgtagttccagctacttgggtggctgaggcacaagaatcacttgaacctgggaggcggaggttacagtgagccaggattgaactactgtactccagccaaagcaagactctgtatcaaaaatcaatcaatgaatcaatcaatcagtccactcaggagtcagttatatctgaagcctatatggcaaaaactaatgtttgacaaagctggctggtgattttccaatatatattgttattttatgcctttctgaatgactgaaatattgaataataaaaaaaattaaaaacaaaccaaaatctgatcaccttactcccaccctcacctggcttaaaatgactcttaggacaaagattatactattattactgtactactatcacttcttccttttagttttattatggaaaactttcaaatgcatatgaaaatggaaagaacaatattataaactcccttggacgcagcacccacaaggatcacttgagtccgggagtttgagaccagcctgtgcaacatggcaaaaccccatctctacaaaaaaatacaaagagtagctgggtgtggtggcatgtgcctgtagtcacagctacttgggaggctgaggcaggaggattgcttgagcccaggaagctgaggctacagtggacagagatcacaccactgcactcaagcctgggccacagcgcaaaaccctgtctaaaacaaaaacaaaaacatgcttaatgaagccgatgaggccctgcatgactgagtccttcccatctctctgacttccttttataccacccattctccccattggtcactagactccagtcaccctgcccttccctctctttttctaatatacaggctccttcccattcaggaattcagtaaggtactctttcctggagtctcattctcagccttcacctagcctcttctgttcattcacagatgtcagctgagatgtcatgtactcagggaggccatccctgatatcacagcctatatctcctgccacacacttttgtagctcctggttcttctctttcattccacttatcaccactgtaatgaaatgtttagtatttccatgtctatctctcccaccggctgtaacttccatgaggatgagttcaaaggggactacaggcatgtaaaccattatttataatgtaatacaaaatatgctataaatgaggatacatataatgccattgggagcacatagaaagtccatttaaccccagacagatagccctccctgatgaagtggcattcaagttgcattttgaagtagcgcaccatggggaggccagagtacatatgggaaaggagttctagggagagggaatgaaataaaggcacagaggcaggactctgcaggatatgctcaggcaacacaattaggtcagtatagctagaggttggggtacttgaggtgagcaataaagggtagaaggtacaggacagaacatgaggctggcagaaccaggcatggtggctcatgcctgtaatcccagcttctcaggaggctgaggctggaggattgcttgagaccaagagtttgaggtcatagtgagctatgattgtgccactgcactccagcctgagcgacagagcagaaccccatctctacaaaagaaaacagggctggaaaggtgcattggcatcacattgtaagggttgttgtgtcatgctaaagaatctggactttaagactggcaatgaggaaccagaagatcggcttcacagtcaatccacttaggctaaaataatggaactttttaacatgacttacaggttatttagttcaaccatctccctgttgcagttaagaaactgagacttggtctggctgtggggctcacatctgtaaccctagcactttgggaggccaagctgggaggatcacttgagcccaggagtttgagaccagcctgggcaacatggcgaaaccctatctctacaaaaaatacaaagattagctgtgtatggtggcatacacctacagtcacagctacttgggagactgaggcaggaggattgcttgagcccaagaagttgaggctacagagagcagagattgtaccactgcactgcagcctgggccatagagtgaaaccctgtcttaaaaaaattaggccaggtgcagtggctcacacttgtaatcccagcactttgggaggctgaggtgggtggatcacctgaggtcagaagttcgagatcagcctggccaatagggtgaaaccctgtctttactaaaaaatacaaagaattagctgagcgtggtggtgggcacctgtaatcccagctacttaggaggctgaggcaggagaatcacttgaacccgagaggcggaggttgcagtgagccaaaatcacgccattgcactccagcctgggtgacaagagcaagactatgtctcaaaaaaaaattttttttaatttaaattttaaaaaccctgaggcctggccactggtctttgtcttcacttttcccttttcttaactcaccaagaagtcgagcctcaggggacagaaaattagcagatctgcgggagggccttggacagggtgaggaagactaaggcctctccttttccagagagtgaatgagaccatggccacactcctgactgtgggcagaggcctccccagaactgcaaaacttggacatcccagtgctgacccaaaaccccaaatgtgccacctccccgggtatggtgatcatctggcttgtggtggcctcctgggagtgggccaaggacattctgcagagcgccagggaattcccgctagtgcacttaccacccactcaagagccgatggcagccaacaggcaatgctgcgccattaaggtgtttgtcaagaagctaagctgggcattgtgggcgatcctgagggccctttttagattggctgtaagtgaagaaaaaaaacagcatttggaggcaaactagagctagtgcagagggtgtagcatgacagaaaaccctctgagaggcagagatgcttgcctccatgtctggcttccttaccaacttgctctgtgattttgaataagtcatttcccctcccggagttttctttctctcttctgcaaaacaagtatgttaaattagatgatctctgagtattggtgaccagtgcattttctagatacctgaatgattatgccttcagtatgaaattttacgaattagttatataactcaggtgggctcagcagcaaggctgggacctcagttatatgggtagaggaggaagcagggttttggtgggacaagaagtggagggaactgacacagtgataggacccatccctgaggagtcaccagaaagacccagtgatttggtctggcagcaataaccaaacgtggtggtcaaagaggagaaatgacttattaaaaatcaccaagggctgggtgaggtggctcacacctgtaatcccagcactttgggaggctgaggtgagtggaccacctaagatcaggagttcgagaccagcctgactaacatggtgaaaccctgtctctactaaaaatacaaaaattagccgggcatggtggcgtgcacctgtaattccaactactcgggaggctgaggcaggagaatcacttgaacccaggaggcagaggttgcagtgagccaagatcgcaccactgcactccagcctgtgcgacagagcgagacaccatctcaaaaaaaaaaaaaaaaaaaaaatcactaagagcaagttggtgggggagctgggaatggagccaagcgtctctgcctttcagcggttctttccaaggagtatgggagcaggaatagacaataacattgtacgaacacttactatgtgccagaatctgctaaatgcttcttgctgctgtaacaaattaccacaaacttatttctaaaagcaacacagacttgttttcttacatttctggaggtcagaagtccaaaatgggtcttgctggactgaaatcaagttattggcagggctgcattcctgctggagtttctaggagaggatctcttccttgccttttccagtgtctagagaatgcccgcatcccttggcttgtggccccttctagcagcagcagcactgctataacctatgtctcccaacaccttctctgactcaaaccccctgccttcctcttataaggatgcttgtgatttcattagacccacctggataatccgggctaatctcccccatctgaagatccttaacttaatcatttctataaagtctcttttaccacataaggcaacatattcccaggttttggggattaggatgtggctgtctttgaagggtcattattttacctaccacagtgcatcatctcactgagtcctcctaacagcccttctttaaacatctgtttaacagatgaggaatgtgatgcttagaggagttaggtcatttgcccaagggcactctgctggaaagagaaaagttaggtaatatttggtatgtggtggcatcttggtcccaagtgagctgtctttttagataggaccccattcagctcccaagtgtattgagaatacagtctaactctgtggaggaggctgtctaagaactaggcagggaatctgagaccctgaaaaatagattagggtcacagcagtctcagcttagaacttgaatgctagagagagaaactgagggaaaaaacccagttgtaagcattaagccaatatagcaatggatgaggaagaatgatcttaggccaccattcatgcctgcatacagtgatacaataatatcttagtgttgggggttgaagctgctgatggaccatttgctcaagttaggattgaccaaggagatggacaaggtgagggactcagagataactgcagagccgaggcacagagagcagaggctggctactgagccagtgctaatagaagacttttctaaatgggtaacatagtcaattataagtgacactgaacaacatgtccatttcgtcatggttatggcaggccctgtgctagctgttggggtgacaatgatgaggaggacatatatgcattttagagtcaggaggaagcgacagatatttcaacatgtggttacaatacagtgtggtaagaattgcgataaggaaacagatgggggactgacagggatgtacaaggaccttctgaaatagatgtaagaggccaaggctccccaaagagggaggaggggagagtgaactgaatagaaggaacaatacgtgtaagggcctgggagaactggaactcactggaacacagagcactaggtggggaaagataaaaggggttgcagagggagtcagggaccatatcataaaggctcttaactgcagagatggaaagctcttagagccacctcagggcattcacacttactgttccctcatcctggaacacgctttcctagtagccacagggtccactccctcacctccttcagatctcttgctcaaatgtcacctgctcaaagagattgtccctgatcaccctccataaatagctgtcccactctccatctctccaaccggctctattcttcacagcacttattcccacatggttcttccactagaccataactactagaaagtaactagaatgctgtttttggtttttgtttttgtttctgttttagacatggtctcattctgtcgcccacagcccactgcagcctccaactcctgggctcaaggatcttcctgccacagtctccagagcagctaggactacaggggtgtgtcaccacgcctggctacttttttcaatttttttttttttttttagacagagtcttgctctgtcgccaggctggggtgcagtgccgtgatcttggctcactgcaacctccacctcctggggtcaagcgattctcctgcctcagcctcccgagtagctaggattacaggcgcacgcccggctaatttttgtatttttagtagagatggggtttcaccgtgttggccaggatggtctcgatctcttgacctcatgatctgtctgcctcggcctctcaaagtgctgagattacaggcatgagccaccacgcctggctgtttttcaatttttttctttttttgtagagaggtgtcttgctatgttggccaggctgggactagaatgtttttgtttgctcttttagccctagcacacagtacttggtacatagtaggtcctcaataaatatttattgaatgaagggacagaaataaacatttgatgtttaggaggtaggacccatagttctttggtaaaagactagtgtgctgtggctcacgcctgtaatcccagcactttatgaggccaaggcagatgtatcacttgagcctaggagttcaagaccagccctagcaacacagcgagacttcgtctccacaaaagattaaaaaagaaaaattagccaggcgtggtggcaaacgcctgtagtcccagctactcaggaggctgaggtgggaggatcacttgagcccagaagttcaaggctgcagtgagccatggctgagagcgagaccctgtctcaaaaaaaaaccaaccaaacaaacaaacaaaaaaggaaactggatgtaggcagtgaaggagagggaagagtcacaggtcatatgaggctgctggtttggacaactgggtagctgatggtgccataccctgacatagcacaggcatattgagctcactattgtctgagataaggcattgcactccaggagtgtgaggtataggaagtcctgggagggggaagggctgcctgtccaacactctgaccgtacggaatatgcctgaattctgccatttcttagctttagggctctggatacttgtaggcactgccagagctctgcctcttgccacccccattgccacttctaacctcaccaccacctctgctgtctcccgctctcttccctcttctgtgcacattttgttctccttggtattctctgctctctcctttcactgccaccactccgggacttctcagctttggcttctcaggaacccaaatcctgccttctggccggcagaccagtcacaccatattgtctatgatctctacgtctttggctcagcccagctattttggtctctgcttgcactctgagatttttcttactttcctctgggtttacacctctttctgcacttaaagggtgacagacatcttaagagttggttaactgagctgtaaaggttagacttctgacgtggctgatgattgattaatggatctaggtgtaaagagatgaaagcaaggtcattctgtctaaaagtgaatgggacttttttccttcagtgggttttatcttttttttcaaatggaacaatggaacctattgcctcatcaagcaaggaagtcaaatcacaatagattgaatttcagcaagtgttttttgaaacctctaatagataccaggaattgtgcttggtgctttcagtgtattactaaatcttcccaagatgaagtcccttccttgatatccaggcagtgcctcctagatcaactgttcattcattaactcagtgattatttcttgtgtcagacactgtgctaaatactataacagatacaaaaataaatatgacaccatctctgttctccaggaactcaatctagtgggaaaaacagacatatccatgactgggtatgatacattgtggtagctgtgtgtacaaagtactgcaggagtaaagagggcacccactagctctgacagggagagctaaggaagatttaacaaaggaggtgacattgagctagaccttgaaggatgagtaggagtttgctaatgtgcataaagagaatgggttttggaggcagcagaaacagcctggaactgtgaagggcagagagtgctttggacttgctatgactggaatgtagaacacttgctctagcctcaggagttctgcccagagaaggcagaggattgtctgggtcacagagaaagtgagtggcagagacaggattaagcagcatgaattagaattgtccgaccccgatccatcttccttagcctctaatacacacacacagacacacagacacacacacacataatgctagtccaacttcttgtcctgtcccctggcttagatgctgtcattcgactgcccccaccccatttgcccttctaggagtgtgcccctaggctctgaggattgtccccagagaacctgggagagaaacagagcctagagaatattagagaatacactaatactggcccacccccaccatgtgtctgatccatcccagtgtttagttctggcctagacatttgcctatgacctgagtccatagatcctaactcctgatgtggccacgatagactctgtgatgttcgtaatggatttggatgggctgtgagatgctccttgcttgagtatcccagaaaacgagctgcgtaaaccaggttgccagctttttactgaggaggagctacttttaattcccagagcactggaacgctagagtgggcttatgtagaagaccccctgttcctcacttcctaccataagcaggaatgaaaatttttaaattccatgctagcttcgaggtggatgctcaaaaaatactccattggctgactggcttgtgagtagttatctgttcagaggtccctagctatttcccaaatggtgtaattcatcttagtcaaatttttagagaaccagtagagtccgttggcagatagggaggcactggatatattttaggtttgtaccacacctcttttggggatgtcttgaggcagcttacatattaaaacataatgtcttgtggctctacgcctgtaatcccagcacttacggaggccaaggcgggtggatcacctgagcccaggagttcaagaccagcctggccaaaatggtgaaaccccgtccctactaaaaatacaaaaattacctgggcatggtggcacatgcctgtaatcccagctacttgggaggctgagacaggagaattgcttgaacctgggaggcagagattgcagtgagccgagatcgtaccactgcactccagcctgggcaacagagtgagactccatctcaaaaaataaaataaaataaaaattaaatttaaaaaaagcccataatgtctttatgtaagtcttttaaggatgaaacataaaacttggtggtctgaaggatgaaaaaagtaatggttacttccaaacatccccatgctcaacaaataagctataaatttggctgaaaaattcctgggagaaagacaaaaagggaaacgcattgggttatccagtgttccttttcttataccttaaagtatacagaatatcctatagggaaaacattttcctcaagctaaagcctaatagaaagtaattgtgtttggtcctaagaaagttgagtgagaaggtgaagggtatgtaattccatttagccgtcgtttctccgtatccactcagcaccaggccctatgcagtgtccccagtcttctgggagatgctgtcatgtccataagtcacccaagagaaagaagacttgaccgcaaaagatgaactgccctccataggacccacaagaactggctcttggtccaaggagcacatgggagggcaggatggctagatttcaaaaagcaagagtcaaatggccaggcacggtggctcatgcctgtaatcccagcactttgggaggccaaggcaggtgtatcacttgaggtcaggagttcaagaccagcctggccaacatggtgaaaccccatctctactaaaaatacaaaaattagccaggcagtagtggcatgtgcctgtaatcccagctacttgggaggctgaggcagaagaatcacttgaacctcgggggtgaaggttgcagtgagccgagatcacaccactgcactccagcctgggcaagagagcaagacttcatctcaaaaaaagaaaaaaaaaatctgctcagaatgtgctatgctctcccacatttccaggcaattgcacatgctgtatacttcaaggcttagcttaaatctcatctctatctggaagccgtccctgagttcccctttctctgtggtgctctgctccccaccatggataagacacccttcttttgttctcccatagaactctatgcacacttgctttttagcattgtatttttattgtgggtttacttgtcagtctctgagttccttattcatctttattttttcagagcctcgcacagtgcctagcctgtagtaggtgctcagttaatgcttgttgaatgcacataatgagcaactactgtatccagcactgtcctgggcactggatgattaagctacagccccttccctcgaggatgttaaagtcccagcactttgggaggaggagaaggaggaggaggaggaggagactcttacataatgattccagcccaatcttataatatctataataggggatttggggagcacagaagaggaagaaaataacttagcctgacacgtcaggaaagtcttccagaggtagtaatttatgggctgaaccttaaaatataatttgttttttgccaaactgagaaaaatattaggcagaggaaaaaacatgtattaatacaaaggcaggaaagagaatcaatatttagggaactgcaagtattgatattctgtgccatcatttggaatggaaagtatgtttcagatccaattgtgagagacagaaagttgttactttattgtgtatgtttcaaggctttattattccaacaatttttcttgtatcatcagatggattttatcacaaggcagtaaagatgttatagtcacctttggtgaagcaaataataacttatttatagtttctggctggctgccttctgaaaaactgtttcatttgacttataataaaagacacatccataattagcctgttcatatagacacatgaaacaaaagctatagctaggaggggaataatgccatttccccaggctcttttcccttcattggcttacttggcattcaggataatcctctgaggatgggaaacagggttatctagattcgagcccagcatgtagctcctggaagtgcttgtgggctcaacaaatacacggatgttttcctcattttccagctgatgccacacatatttcctggtactcttgtgtccctgggtctccatcccctcatgcttttgggtgggaataatttttttgtttgttttttgagacagagttttgctcttgttgccccagctcgagtgtaatggcgtgatctcagctcactgcaacctccgcctcctgggttcaagtgattctcctgcctcagcctcccgagtagctgagattacaggcacccgtcaccatgcccggctaatttttgtattttagtagagacggggtttcaccatgttggtcaggctggtctcgaactcctgacctcaggtgatccacccaccttggccttccaaagtgctgagattacaggcatgagccaccgcgcccagccgggaataatctttacttgctatccttcagagtcattacttgttggagctccttcacccaagcttctttcagattctcttgcctttttaatgtttttctcctctttaaaaaaatcactccatgcataaaacttagaaaacaggaaagcacagaaaagaagtgcctcgtgatactataaccaaaggatactcagtcaattcttttttatttaaaaaaaaaagttatgacatcatttcagactttcagaaacattttcgagaataggacaatttctttaaatatttatttatttacttatttattttagagatgagatctcactctgtggcccagcctggagtacagtggcatgatcatgtctcactacagcctcttactcccgggctcaagcgatcctcctgcctcagcctcccaagtagctaggaccatgggtgcacaccagcatgcacagctaatgtttaacttttttgtagagatggggtcttgatatgtggcccaggctggtctcaaactcttggcttcaagccatcctttcacctcagcctcttaaagcactgggattacaggcatgagccaccacacccagccaataaagaattcttgaatgctcctcacccaaaactgttaacatctaactatacttactttatctctctctcttctctctgtctctgtctgtctctctctttatatatataggcatatatgtatatttcttttttttttttaagacagagtcttgctctgtcacccaggctggagggcagttgtgcaatcttggctcagtgcagcctctgcctcccaggtccgagtgattctcctgccttagcctcctgagtagctgggattacaggtgtgcaccaccacgactggctaatttttgtatttttagtagagacgaggtttcatcatattggccaagctggtctcgaactcctgacctcaagtgatcctcccgcctaggcctcccaaagtgctgggattttaggcgcgaaccaccacgcctggccatatatgtatatttctgaacccatttaagaataatttgctagccaattgtcacctgggccaaaaaaaaaaaaaaaagaataagttgcagatattatgcacccttatgtcagcctcagtccttcagtgtgtatttcctaaaaatcacatattctcctacatattaatttttatatatgcctttctagattttttctatgcacacatgatttatttatatttaaataagatcatgcattgttttatttatatttatttatagtgccttgcttttttggggggtagcaatacatattgtatataatctcctgccaataaatattctacaacatgattcttcatcaggctttgacagcagacacggtggatttctgggtggcacaacattttcaaaataccactctgcatcacggaatcagccgtgctggccgggcgcggtggctcacgcctgtaatcccacaactttgggaggctgaggcgggcggatcatgaggtcaggagatcgagaccatcctgggtaacatagtgaaaccctgtctctactaaaaaaaaaaaaaaaaatacaaaaaattttacaaaaattagctaggcatggtggcgtgtgcctgtaatcccagctattcgggaggctgaggcaggagaatcacttgaaccccggaggcggaggttgcagtgagctgagattgtgtcactgcactccagcctggcgacaaagctggactccgtctcaaaaaataaaaaagaattaaccatgctgtgcttttccaggtctagtccaatatcagtggaaagcactgaataaatgagtaaagaggcagggcaatggaaaactctgaattcaaatttaatctttattctgtggccagtagaaatccaatgaaatgtttctagcaggaggggacaccaataaaagctgctctctggagatgaatttgacagtgtctgcaggatggggtgaaggaaaaagaactcagagcatgagtccaggagtcactggggtcaaatgatccctcgtgttcaaggcacatctctgcccaggtagaacagagcctttcccagcataacgcatctttttctttcccgtgtctttcagaactggttaaagtcctatggctatctgcttccctatgactcacgggcatctgcgctgcactcagcgaaggccttgcagtcggcagtctccactatgcagcagttttacgggatcccggtcaccggtgtgttggatcagacaacgatcgagtaagatttccataggacattgtgcctttgaactttctggacttacatttgggttcacatttgtcatggcctgtgtacaccccatgcccatcctcccttcctatcttttattcctgcagtgccatcctgggaaagaatatctcgatgtgagttgggggtgtgctgggatgggagtccagccctcccattaacattccatgtgaccttggagacaagttgcttaacccttctggacctcagtttccttatcagtacagtgaggggttgggttatagatggggtcttaaatcccctctggctcgaataatttatctatgggtcaccctctggagttccctgcaacgtgcatgtctcacagaatacagaaaacgcttgaatgataatgagttggctccactttttccatttaccaaacatgtgctgggtgcctgcatgtgcctgtcatccggccctccagaggctcaccatttagtgacaaatacagtcatctagccacaccagtctagagctcagaaggaaacaatgagttttggggagacacttaggaggtagtaacacttaggaggtagaaaaaagccatgaggatggtcccaatcactcaaggagaatgtaaagattcacgggcagggtgctggggatggaaccccacaaagccagccgagaaggggcagccggagggcaagaagcctgacgtgatgatgtgatgcaatgtcatgatgccacatggtgtggggtggtcagtggggccagccactccagagccctccaacaggagcatggctgaaagttgtctgctgggtttagtgacaaagagcttgttgttaacctcagcagaatggtggagatgaagtcagactgaagtggggagaagcggaggtgaggagaagaggtggcaagtggagggaagacattcaagaagcttgacagggaggtggggagaaatgggtagcagctagaggatgaagttttgtttgtctaagataggagagagttgaacagccttaaacttgcttaagaaagctatgagagttgtttaagaaaagccattcacatcattaaagcatggaaaagaacaggagtgagtttcctaaggaggtgggaagggaggggaacctgaggcaggtggaagatgctagcagggctgggtgaggatccaagggagttggtggggggaggaacaggaaatgcacccagttgtggatcaaggatcaatttgacgtaagtcactcctggacagaatcatctctctgggtctcagtgtgttcatttgcaaaggagggtgttggattatggctctaaattctagattcccccccccttttttttttttttgatgagatgaagtctcgatctgtcacccaggctggagggcagtggcgtgatctcggttcactgcaaccactgcctccagggttcaagcgattctcctgcctcagcctcccaagtagctaagattacaggcatgtaccaccatgctggctaattttttttgtatttttagtagagatggggtttcaccatgttggccaggctggtctcgaactcctgacctcaggtgatcggcccacctcggcctcccagagtgctaggattacaggcgtgagccaccgtgcccagcctagattccattattttaagcatctaagcttttaaaacttggcaagtctggggttttaggatcctaaaatcctgtgtgaacatttcccattcctaggattctctgattatgagtgtgaacttcttctcctgtgctgttgtgaatacagtggactccttggccccgtggtctccagagtgggctggttaaagagagcccagccgcctttcaaagcggaggttattttgagggctttgcacaggcctcatggcagtgcatcctggggcagaagcactggtgtctctgctgcggcaccacctggccttgggttttactctgttccaaaaagccccaggcctgttggatggcgctcagagagtggcaggtggatggtgaaaggaggaggcagcgggaatgatccgagggaaaaggatggcatttcccacttgcagttctgcccacacctccttgtagaaggcgggggagttgtggtctggaagcaggggaaggaggaagccagttgcacttattaatccaagacctgagatggggagtgttcagggtagaatttagagccccaagatgcagctccagctctgtgaccttgggcaatggctgcctttctctgagcctgtttcctcccctaggtgcctttgggtctaactcagtcagaggtggttcttggttcccttcccagggactgttaattaaaggaagctagattagccatttaaagtcctatgtttgagtgtcgccttgggaaatgtcacacatttattcattcactcattcatttggtcaacaacatagttcctctagctcagctttgtgctaagcactgacaggaaaaaataaaagctccaggctttgttaaattgcattaatgaatagttcattttttcattcaactaagttccagtcctgccttgctgatttctgtgttttgcaaggtactggatttatctgtggattgtttccctcatctgtgaaatgggaataataatttcttttttttttttttgagacggagtctcgctctgtcgcccaggttggagtgcagtggcgggatctcggctcactgcaagctccacctcctgggttcaagccattctcctgcctcagcctcccaagtagctgggactacaggggcccgccaccacgcccggctaattttttttttttattttttagtacagacggggtttcaccatgttagccaggatggtctcgatctcctgacctcgtgatccgcccgcctcggcctcccaaagtgctgggattacaggtgtgagccaccgtgcctggcccgggaataataatttctgttacctcacagtgttgttttgagaatcaaacttttttattttatttatttatttatctatttattgagacaaggtctgactcccctcacccaagtgtactggtgtgatcttggctcactgtagcctcaactttccaagctcaggtgatcctcccacctcagcctccctagtagctgggactacaggcacatgccaccatgcctggctaattttttgtatctttagtagagatagggttttgccatgttgcccaggctggtcacaatcttctaggctcaagcaatctcctgcctcagcttcccaaagtgctaggattataggtgttagctactgcacctggccaagaattaaacattttaaaagaatgtgctgggcgcagtggctcatgtctgtagtcccagcactttgggaggccaaggtgggcagatcacctgaggctaggagttcaagaccagcttggccaacatagtgaaaccctgtctgtactaaaagtacaaaaattagccaagcgtggtggtgcgcgcctgtaatcccagctactactcaggaggttgaggcaggagaattgcttgaacttgggaggcagaggttgcagtgagctgagatggcaccactacactccagcctgggcaacagagcgagactctgtctcaaaaaaaaaaaaagaaagaaagaaagagaaatacctgaaactgggtaatttataaagaaaagaggtttagttggctcagggttccacaggctttacaggaagcatggctggggacgcctcaggaaactttcaatcgtagtagaaggcaaaggggaaacaagcacatcatcatatggcaggagcagggggaagagtgagaagggggaggtgctccacaccattaaacaaccagatctcatgagaactcactcactatcagcagaacagcaagggggaagtctgcctgcatggcccaatcacctcccaccaggccccgcctccaacagagacacaaatcaaaacatatcacctggtaacaaacagatatcaggatttacgtaatttcaggcactgggctaccttcttttgaggatacaatgatgaataggacatagttcctgtcctcaatttaccatttattagaggaaataaaccaataaattttaaatcacaacacaatataataagtgctgcagagaattatgttccacatcccacagttgttaagccacttcttttttttttttttttcctgaaacggcatttcactcttcttgcccaggctggagcacaatggcacaatcttggttcactgcaacctccgcctcacgggttcaagcaagtcccctgcctcggcctgctgagtagctgggattacaagtgtgaaccactgcagctggctaatttttttttttgtatttttagtacagatggggtttcaccgtgttggccaggctggtctcgaactcctgacctcagataatccacccgcctcagcctcccaaagtgctgggattacaggcgtgagccaccgtgcccagctgaagagtttgaattttattctcagtgtttggggaagtcgctggaggcttttaaccagggcatcctgtaatctcattgcatttacagagcattttcacatgtacttcctccttgaagacgcacctccacctaagaccaagaactagagttctcatgttgcagaggaggaaactgaggttcatattggttcagccacttgcctgggggtcctatgactagtggtggagctggagcttatcaagcccatatattctgattctcagtctttatacagctatttcctcatctatgattgtgagtgcatgaattaatgaatcaatcaatcatgttcttgttggggtccatccaagccagggtcccagagtgtagcttgaggatgcacattgctttccagactggagctggggaataggcagtcccttcctaaagtgttcagtgaccacagtgcatatgcgtgtgtgtgtgtcctctctctgcccaggtggatgaagaaaccccgatgtggtgtccctgatcacccccacttaagccgtaggcggagaaacaagcgctatgccctgactggacagaagtggaggcaaaaacacatcacctacaggtgcttcgactctccctcttcctccctgcctttggctccaccctcactctgtttttcctggcctgagtttcaaaggctcacaatgtaggggggcctggggatcaggcttacaacataggccaagagccaggcatgtgggcattggcactaggtgctgagagcccataaccttgtcctccttgtggcttccacaggatgctgtgactccaacctcaggtttatttggtcctctgggggctcttagttgtcttctgtttagatgcctatagtttttaggttacaggaagtggggtatgaatggtttggtaactttcagctgtgaaaaagaatcgtggcttgcagtgagctatatcatgccactgcactccagcctgcgtgacagagtgagactctgtctccaaaacaaaacaaatgaaacaaaaaccacaaaacaaaacaaacaaaaccatggcttaattcagtctccttatcactgcctgccaaaccccattccctctgatctggatcctcccaccccaaaatccacctgatggacttcacctgagattcccaacgcagagttccagttgtttcttaaggagtataaagaactgggacctgaatcataatagtgtcatctttgactgtctggaggaaccaagggcagagcaggatccatctccaagtcagatcagtggcccaagaactagatgatggagcccatcacagcagactgaagcaccggagtgaggctggggcaagggccaggcattgagcaggctcaggtgggggtggggcaaggggcaggcactggacaggctcaggtggggctggggcaagggccaggcatgggcaggctcaggtggggctggggcaagggccaggcatgggcaggctcaggtggggctggggcaagggcccggcatgggcaggctcaggtggggctggggcaagggccaggcatgggcaggctcaggtggggctggggcaagggccaggcatgggcaggctcaggtggggctggggcaagggccaggcatgggcaggctcaggtggggctggggcaagggccaggcatgggcaggctcaggtggggctggggcaagggccaggcatgggcaggctcgggtgggtgctggctggcacttctcaaggctctgctgtcatctcaggtggatccctttggtgcagaggcaagatctaagacagagatcctcaagagttgaactaagggctcccctgctgacaagcactccctacagaacgggactttttttttttttttttttttttcagaaatctgacaagagaaggaaagttagggttgaactaagggctcttctgctgataagctgtcccttcagaacgggattttttttttccagaaatctgacaagagaaggaaacttaagaatctaggttagaaactgaatagactcttgggtctcttgaaggggtagagtggatcaagagaaagaagcactgggttctaacccaactctgagtaacttctatcactagacttctctgggcttcagtttccttacgtgtggagtaggtagaataatccatgccccagagggtcacagggcagggaacccacaggtagtaacgttgttttgtgaagaaccaatgcaatatgaacacagcgacgctaaacagctaaacctataatggattaaatcagataccggccagcttctaggcagacaagccaaagattggtaccaaagattttttaaagagacttttcacttaaactcctctctattatttgaatatttttataacttttataaatgaacatatttcgtattagggaaaaaaacttaaaattcagaaaatgctatctaccaatttcctttgggttttttttttttttttttgagacagagtctcactcttgttacccaggctggagtgcagtggtgcaatcttggctcactgcaacctctgcctccgggttcaagcaattatcctgcttcagcctcccgagtagctgggattacagactcacaccaccacgcctggctaatttttgtacttttagtagagacagggtttcaccatgttggtcaggctggtctcgaactcctgacctcatgtggtccgccagcctcggcctcccaaagtgctgggattacaggcgtgaaccgctgcgcccagccccaatttacttttctcaacaaactagagtggaatcctttattcgacacagctttgctggagatcaaatggaaaacactgagtaaagcaaagccatctgactgaggcagggtggggatccagagctctgttactcagcctcttcttcaatccctgaggcagctaagcagaattctagggttcaaaatcagatcactgagccacattgtctcaggtatctattttagctctgctagtctctgactctctgatcttgcctaatgatcctcccctctctcaccagcattcacaactataccccaaaagtgggtgagctagacacgcggaaagctattcgccaggctttcgatgtgtggcagaaggtgaccccactgacctttgaagaggtgccataccatgagatcaaaagtgaccggaaggaggcagacatcatgatcttttttgcttctggtttccatggcgacagctccccatttgatggagaagggggattcctggcccatgcctacttccctggcccagggattggaggagacacccactttgactccgatgagccatggacgctaggaaatgccaaccatgacggtaaggccatgaggggacaggggtcagtcttgggctgctcagttgttgggaaagaacttggaggacatcctagatgagtttcctgctttctagagcctcttgtccaagaactaagaccgtaagagggtgggaactgtgatttctgataatattcaacgttcaatccaccagggccagggccatggagatgagtcagatcacttagaagatagtccggttggcaggagaaaagtaaggttaggccagtaagaagataaagtaatggaccagaggctgaagaaaaagtttaaaaggggccaggcacaatggctcacgcctgtaatcccagtactttgggaggccaaggcaggtggatcacctgaggtcaggagttcaagaccagcctggccaacatggtgaaaccctgtctccactaaaaatacaaaaattatctgggcgtggtggcgggtgcctgtaatcccagctactcaggaggctgaggcatgagaatcgcttgaacccagaaggcagaggttgcagtgagccgagatcgcaccattgtactccagcccaggcgacaagagtgaaactccatctcaaaaaaaaaaaaagttaaaaggcattaaagctgaaagaggggtctgaaagtagtaggctctggcctgaatgatgagggctccaaaagccatcttatgaatgacacgactggctctctcctttgtcaccctcacaggtgagtagcaggccctgaaattattctggcatccttggataatttaccctgcaccactatggttcaatgaatatttatggaggcagagtcaataccgtgcagcaatagtaatgataccctgcaggttgccaaaaaattcatcatcaatatttactcacaaggcacatgcttagtatgtaggcaagtgtacattattacacccatttttaagatgaagagttggggctcaactggcatagctgaaaggtgacaatgcaggtatcaagccctggttcaactactggctatgtgataccctcggtctcctcgtctgcaaagtgaggggctggattaggtgatcgctaagggcccttccaactctaatgaacatgatacaaagtcttgcaaagaccagggggagctgaatgtttgaaaaaaatggcatgatctctgtcccctggcagtccagagtcagtctagcaggggagttaggtgtgcacgtaagtaaccctgtcatagacagactctacccaaggctgtagcagaggcacaaagaaatatgtaggagtttggaggaaagagggacagaggagtgtggcttttggattataagagatgataattagtgggtatgctggtgttctgaggcccgtgccaagtgcttgccacccattatgtgtggaaactattatatctattaatacattataatgcataattaaatttatgtattaagcaatatataatgttaaattattattataggtaaatattgctatcttcattttacagataggtaaactgagatatagagaaacattaagtcacctacctaaggtcccacagttggtgaatggtgaaataaggctttgaatctgggcattatggccctggagcccatgctgtcagccatcatgctaagcttccatggttctcaaactgtagggcacagcagaatcacctgggaaccatttttaagaattcagattccaggccaggcacggtggatcacacctgtaatcccagcactttgggaggccgaggcaggtggatcacctgaggtcgggagttcaagaccagcctggccaacatggtgaaacccatctctacgaaaaacacaaaaattagccaggcatgttggcaggtgcctgtaatcctagctactctggaggctgaggcaggagaatcccttgaacccgggaggcggaggttacagtgagccgagatcatgccactgcactccagcctgggcaacagagattccgtctcaaaaaaaaaaaaaaaaaaaaaaaaaagactgcagattccaggaccctaacctcttgtcattctgattctctgggtccggggtagggcctgggaatctgcaagtggtctaatacattcctggggccttctgatgcaggtgttccatcaccatgagaaacgctatcttaatacctagagttttcctacctggcctgatcataagaaccaatgggggttcttgttataaacggggattcccaggcccttcccacagaaatcctgactcttgagctcaaacaagcttgggaaacaccgagcatccttttttcctgccctgcggctgctccaggctgagagcagactctcaaagctggtttggtgtctatagttggggccatgtttggtgtctatagttggggatcacctccttgagaacactttatatcatcgcatggattagggattggcagctctggggttatctgtcaaaggctggaccaggaggtggtttggccaaggctcagcctaggcaaagtcatgaacctgttaaattgttctttgtcctcttctttcttcagatttttgtcctctttcctattgaactccgtttcctttgccctggtatctctcccgtatgtcctgcatgtattcctggctgagtacctgttctttatctcattcttatttttggatcggtgtcaacgaatggctgtctgtgctaacagataagatgtgaggagaagagaactaatatttttgaggccctgttatgtgccaggcactgttagctgatagggttttagttatattcctgatagaggcaaatgaatgtccaaagagttgtccagaggcaacgggaagacactcccactcctctgccctccccttctgcccagcactgggggtgtgcacttcccacacctgctccttgcttttgcagaacttgttggacccagcccccaaatcccaagagccggtggtatgtgtgggaaggaccggggacctgtggatgggcaccatcccagcacctctcccatctgtccaaccctaaccttcatgaaagactgccaattctgatagaaattccaagattgctaatgttttctttggataagaatcaggactttgctctgctctggaaaaccaagcaggaactgtccagatgcagctcaggaccacagcaatcgactcctgaactggaatgcagtgaaggcaggttttgggtgagaggcaaggaaccaaaatttattgagcatccatatattatctcgtttaatttccacatagactcagcaaaggggtggagtttcctgggaactttttgaacttattagcttacttcttttttctaaactctcattatggaaaatttcaaactcacaaaagtaggaagaatgcttctatgatctcccagatacccaccacctgcctcagcaattatcaacgttgtggcattcctatttatctacctttttttggctgatgtattttaaagaaaatctcaggcattctaacatttcacctttaaatactttagtatatacctctaacagataaaggctaatttttaacataagcacacaatcattatcaagcccaacaaaattaacaataattttttaaaatctaatacccagttcgagttcactttcccaaagtaccttggaaatgtcttttacagttgtttgcttgaatcaggatccaaacaagatccacacacacatggctgacatgtctcttaaagccctttttatttaaaacacccccgtcctacacacacgtttccctccatatatttgttgaagaaactgggtcaggtgtcccgagtataatcatttggcgtgactagaatcaagtttacttttaatacgtctctcttgcccataattcctgaatgttgttcattagatttacaggctgactagattcaagttcaatttttttggcaagaatacttcctaggtggtgctggtacttcctattcaccatattagcaaatacatatgatgcagactgtcccacttttagtgatgttgaggtcgagcatttgcttcaggttgtgtcagcctgacccaaccattatacaattcacctggagaacttaaaaaaaaaaaacaacaaaaaagattgcctacgtcccaaaccaaacctcctgaatcagaatatcttccccacctcctccatgtgtttaaaaggctccccgggccaggtgcgatgggagcactggagtaatcccagcactttgggaggccgagggggggcagatcacctgaggtcaggagttcgagaccagcctggccaacatggcaaaaccccgtctctactaaaaatacaaaaattagccgggtgtggtggcacatgcctgtaatcccagctactcgggaggctgaggcaggagaatggcttgaacccgggaggcggaggttcaagtgagccgagattgcaccactacactccaacctgggtgacagagtgagatcctgtctcaaaaataaaaaagaaagaaaatactttttaaaaaaataggaaattcacccctttggaaagtggcagagccaggtgtgaccccaggactccgcatttttaagtcaccacaggtggttctgctgcaggtggtccgagtatttcccttggtaaaatacggtgcttttggcgctgttccattccgggggctgtcacctggttcttcaacacaaagcttgtcctcaaggaacccacagtcctggggcagcgagcatgtgcactagtggcaatcacgtggggaggaagcggtcagtgccataaaggcagttcagggaaactgctgggagggcacagcagaaggagcactcactgccagctgggaagtcatggaaggcttcctggaagacaggcatggagctgaactttgaaggaatcaggttattccaggggaaggggcagcactggcagaagaacagaggcaaagggaaatgctatcacctttcgtggggctgggggagttaatgagatgggaacgaccaaatatggagatcctaaaagaaagaaatgaggcagagacaaggtccacttgagtagccgagtagactgctggggacttgctcggaggcccagggacttacaggaacacaccctatcaggggtgctggtgctcacacacagctcaacaggaccctgctaatgaagggtaatacttctgtaccaggagctggtatcagcgcattacacaccctgccccatgaatcttcacccacatccctatgacgaaggtgccattgttccttctatcttccagaggaagaatttaaaatgtcacactgctaggacatggcagagctgggattcaaaaccaggcagtctggctcccagagactgcattcctgaccactctgcttccctgccgctcaccctcttgaagagtgaagaccctagcagcctcctgcccatggagcatggggtcctcatagcaggcctctcctcctcatacctctgccttcacctcacaagctcagggagtcctcctgcccctgccctgctccctctgtctccccctcagggctctcttgggtttctgtgcagcaggatactggctccctcgctcttcccttccttttggttcctggacccaaaccacaggcctctttcctttaaggggtcactcctgttctctgcagacccagaacaggggttaaaagagcaagagacaaggctgcggacaaaggttttgagtctcccacagtgctcagagccgtgttccctggttcccagctgagctccctgtggacagcccctggggaagagcctgctcaggagacagaggccctgaacagcttgtcccaggtcatagaatagcccaggagcacagccaggactggaccccaggaagcagagctgccttccgctggctctaccagtttgtttgggatggagctcagcgatgagctcacccttccctgctgccagaggggccaggacctgagtaaggagctgggggcggcctggccctctcatgccagcagaaggccagccccaggcttttggccaaccttgcactgatcttgcccatcccccttcctttccgttgctcaaaggtggcttcacagaagacactggcggtgtcagtagtgtgggaggcatgtactgcccgtggcctgggtctgccccatggggttcttctctcttccagagacctaagccaggaaggccaaacaatccccacccccatgtgtccctaggccagtgacgctggggccagagtgggcagtaggactctagaccacctcctaggttcctggcagcctccctggacttacaggtggcaggaatgggccgagccatgccttagggccagaagataagaggcagggctcaaggggctacaaatgccagaggtcaaggcaagcaagggtctgacactgggcagacaggagtcaggactggtgatccacagcctacctgactccctaccccctgcattttctccccaaagctgcggttacttcatccccctaagttcaggcctccttgtcctgtcctaggcacaatacagaagcccaggggagttggctttcagaggatctggttgctggcgctccactggcctcgtgcttcctttctggtcaatgggcttcctccagtaaccaagcttctatcttacataggattacaacagctgccattctgtgtcataccacgcacttcacgtgtatcttattcaacctcacacaacccggtgaggtaggtctgatgcccccagtttacaagtgaggacattgaggcttaggggtagccctgctggccatattcacaaactggcagggggaatgaaggtaatctgtcctactcaggagcccaagctcgtaaccaccgtgccatggagctgcctcagttccaccctcaggatcctgtgtcccacttccaggacctggagtgtgttttcacctacacttgaatccctgcctcaatcttagccaacagttccctgcttccacaaccaaggtcctgcagagagctgcccacgcccgggccccacctgccctgcccggggtctcctgaagctgactgccagtttgccaggacttgctctctttgtccccactccctccctccacctcagggcatcctttttttttttttttttttttttgagatggagtctcactctgttgcccaagctggagtgcagtggcgcgatcttggctcactgcaacctccacctcccaggatcaagcgattctcctgcctctacctccggagtagctggtactataggcgcaggccaccatatctggctaatttttggtatttttagtagagatggggtttcaccatgttggccaagctggtctcgaactcctgacctcaagtgatccaccccgatcagcctcccaaagtgctgggattacaggcgtgagccaccacgcccagccagctcagggccttttcatctcttgtaggggtgggttgcccctccacacctgtgggtgtttctcgtaaggtggaatgagagacttaggaaagaaaaagacacagagacaaagtatagagaaagaaataaggggacccagggaaccagcgctcaccatatggaggatcccgccagcctctgagttcccttagtatttattcatcatttgtgggtgtttctcgaagagggggatgtgtcagggtcacaagacaattgtggggagagggtcagcagacaaacacgtgaacaaaggtctttgcatcatagagaatgtaaaggattaagtgctgtgcttttagatatgcatacacataaacatctcaatgctttacaaaaccgtattgctgcccgcaggtcccacctccagccctaaggcggtttttccctatctcagtagatggagcatacaaccgggttttataccgagacattccattgcccagggacgggcaggagacagatgccttcctcttgtctcaactgcaagaggcattccttcctcttttactaatcctcctcagcacagaccctttacgggtgtcgggctgggggacagtcaggtctttcccttcccacgaggccatatttcagactatcacatggggagaaaccttggacaatacctggctttcctaggcagaggtccctgcggccttccgcagtttttgtgtccctgggtacttgagattagggagtggtgatgactcttaaggagcatgctgccttcaagcatctgtttaacaaagcacatcttgcaccgcccttaatccatttaactctgagttgacacagcacatgtttcagagagcacagggttgggggtaaggttatagattaacagaatctcaaggcagaagaatttttcttagtacataacaaaatggagtctcctatgtctacttctttctgcacagacacagtaacaatctgatctctcttgcttttccccacaatctctcgcctggaccccagcatccaaacagatccccctgccccaggtcttgttccctctaatcctccctcaactgcagccagagtgatttaattgtatcaccacccccactcctacttaaaccccccactagccaagaagctgatccaaattcctttgtatggcattaagcgccctgctttccagcctggctgacctcatctctctccggccctcccctcctgctttgttccagagccaggtggaatgaaactgcctgtctctggactgtgtttattgcattccatccgccaggaatgccacccccacccttcctctcctgccccctgaatccgttctcctgactaacttctgatccttcaagactgagcttcaacttcacctttgtgaagctttccctgaacatcttcctccaggtttaaatgacccctctctcctcagaatccctgctcgaccctcccagacattcttaaagcacccagagccctctgcctcacttgtcactctctctctccttgtccctgctctgcagagaggcttgggaggcaggggttgtgcctgatttctctgtatgtccctggtgtccagcacggggcctggcacagggcccgtgctcggtgtttgctgaggtaatgggttggctgaccgactcatatctaagcaggtgccctgggcacctccccacactcctctccacagggaacgacctcttcctggtggctgtgcatgagctgggccacgcgctgggactggagcactccagcgaccccagcgccatcatggcgcccttctaccagtacatggagacgcacaacttcaagctgccccaggacgatctccagggcatccagaagatctatggtgtgtggcagggagaggggggactgctccttcctcggggctgggctgtgactgcctacctgtcatggggcaggggacgagggagggggacgttgctatcatcagcactgctgctgtttctctgtgtgtgacctttacagacttccaatggctttgcctggccagagggcaaggcttcccctggcacacctgggaaacctaggggagggtctgagctgtaactgagagggacaaaagtgaggtgagggccacccattccctctcctttacccctccccttccacactcttccccgtcccttcatgcttctctccctccctcccacaccagatggtgactgagtgctcccatagattccacctctagccaggcaggttcacacatctgcaggagtaacggtgatacagcgtgatggggactataaccagagctttgttctttaaaaagaaaaaacgagggccaggcgtggtggctcttgcctgaaatcccagcactttgggaggctgaggcaggcaggtcacttgaggtcaggagtttgagaccagtctggccaacatggtgaaaccccatctctaccaaaaatattaaaacaaacaaacaaaaaaattagccaggtgtggtggtgggcaagtgaaatctcagctacttgggaggctgaggcaggagaatcacttgaacccaggaggcagaggttgcagtgagctgagatcgcaccactgcactccagcctgggcaacagggcgagactccgtctcaaaaaaaaaaaaaaaaaaaaaaaaaaaaaaagaaagaaaaggtgaaagatgagaagctactgctatctaggtaagatatgaaaggcctcctacacacctctctcccagttctgttcacactggtatgtgaggttcttgttctggtcaagtcaggtgagctagggagaccagtttacttgagcaaatgcttgtcaagacagcacaggcacccacagcccacaggctacggagcacagaaggagggctccctctggaggagatgacccagccagagccctggaggacaggcaggacctccacaagtaaagcagcagagaccaggtgggggctgtgggtcccagaagctattccaaaggtagaacaacaggatctgctgacagatcagacatggggtgagaggaaggagggagggtcaaggatgcccccagggtttccagcttttgtaattgtgaagcaatagggtccaccagtctgcagctcaaaattctaggctggaggccgaggcgggcgattacctgaggtcaggagttcaagtctagcctggccaacatggcaaaaccctgtctctactaaaaatacaaaaaattagcctggcatggtggtgcacgcctataatcccagctacttgggaggctgaggcaggagaatcacttgaacccgggaggcggaggttgcagtgagctgagatcacaccactgcactccagcctaggcgacagagtgagactccgtctcaaaaaaaaaaaaaatctaggctggaatacttatttgggatctttgttgttcaatacagtaaccactagtcatacactagtatgtattaaataaactactattaaataaactagtattaaatttcatagtaatgaaatttaaatttatatttattaggccgggcgcggtggctcaaacctgtaatcctagcgctttgggaggccgaggtgggaggattgcttgaggccaggagttcaagaccagcctgggcaacaaagtgagacccctgtctctacccccccaaaaatatattaaaattatcatttcagttatagttctttagtgggtctcagtcacactaagaactagtcattcatcttaagacctcagtagccatatgtggctgtggctaggggctactgtagtgaacgatgcagatatggaccatttccatcatcacagaacactctactggacagctctgatgcaggtctgtaaagccatgagcctggatgagaccacctagagcagtgattctcaacttggctgccctttggaattaccttgggattctaataaaaaaacacagacacccagccctcagctctagagatttggttttattaatagttgggtattgggcgtggtggctcacgcctgtaatcccagcactttgggaggccaaggtgggtggatcacttgaggtcaggagttcaagaccagcctggtcaacatggtgaaaccccatctctgctaaaaaaaaaaaaaaaaaaaaaaaaaaatcacctgggtgtggtggtacgtgcctgtagtcccagctacttgggaggatgaggcaggagaatcacttgaacctgggaggcagaggttgcagtgagcttagatcacgccactgcactccagcatgggggacggagcgagactccttctcaaaaaaaaaaaaaaaaaaaaaaaagttggagagctggcctggtgcttcctgaacatccagtttgaaaagctcccaaaggtgatcctaatatgcagcccaagtgaagaagcactgacctaaggatgaaaatgtagagacggaagagaagaggacccaagggcacgccagcctctagagtagggcagatgaggacacgcagccagcaaaggagactgagaaagaacagcccatgaggcaggaggacaaccaagagagtgtttccaggaaagtgtttctatgaatcttgctgctcaaaatgtagtcttcagaccagcagcatcagcatcacctgagagtgtgaaggaatgcaaactctcaggccccaccccaggccctctgagccctcatctgcattttagcaacatccccagatgatgcatgtgcttattaaagtctgagtcaagtaaccattggatgatcttggcagagcagttggagtgggtgacgggtagaagctgcactggggtgggaaagagaataaatgaagggggtgaggaagtggggccagtgcgtgtgaagggggcaaagagggtatggcctaaggaagagcgctgaccctaaggaaggacatgattgctctgtaacaggagagagaaaagagaagataccagattcggggatggaaagatgagagtcccattctaatggctattttcatccattttctcaaagactgggggagttaaactggggagagggaacaggaggctgaactgggacagacttgtctcagagctgcctgggtgatgctgagactggcaatgggaggcgggaaacggctgccccctctctaagatgcagctcctctctccaggacccccagccgagcctctggagcccacaaggccactccctacactccccgtccgcaggatccactcaccatcggagaggaaacacgagcgccagcccaggccccctcggccgcccctcggggaccggccatccacaccaggcaccaaacccaacatctgtgacggcaacttcaacacagtggccctcttccggggcgagatgtttgtctttaaggtagggccaatggattggcaccacccagctggcccctgacctttcctcctcctccccgacatcatggagctggggaaggctcctgatttgggattcgattacaatggggcctggacaggagctagcccagtggccagggcatggggtctcttcctagtgctgctgggtgaatcaactgttcccaagagggagggggaaagatgggtgatccctcacctcccctggggttaatgctgggagaaagtgctggaagctggcttctggtctgtgaccacccttcttgggacctcagtttctccatccgaaacctgggggagtcattcctctaacaaagagtgtgtgaagatccagtgagtacccggctctgaagatggtcaacttggagtaggggctaggtcagtggtggctgagtctgactccagaccctaccaaggcttgaggggctgctactggcagcagcccagggtatatcttgtcatctgtcctccatcagccatggactgacagggtggcagtctgcttgacgtgttgcaggttgggctctcggggagtgaactctgaggtggggtctggaatgcaggatttcgattagagagtactttcagaatcaacatttgtgagggggagaaggaagcaggacagggaagagggagaggttaagtggcaacagaggcccatggcagcctcagccacccccgcagggagctctggggctacggtggcctgtcactcagcctacgttgggtccaaaatatctggaacattataacccctacctcattcaatcactggatgaggaagggcatccagtgactgaggagagctctctgaagcagggaacatccccaaaggggctgacagttgaaaactgcctgctggccacactgctggccactggggcaacaagcccttctctgaaggggatctgggcagggtggctccatcacacaggatggtgaaagaggctgcctcgctccccttgtggagttctcccagcacgcactgagcactgcgcaggaatcgggcagcgtgagtcagccccagtctggcttctcactgagtggctctaggcaagtcacctggcctttcttaagactccgtatatctcagatcaacttaacagagacatgaaagtcaaaataaggtcaaaaacctggatgtgaaagtgctttgtaaaacaccttttaaaatactagcttttgtaccatcttttacaaatcatgcttcttcttctgcactcattctactttgatccaactgaaccgttcataggcaggtccgggttttatcatccccatttacacataagaaaactgaggcctggaggctgggcgcagtggctcacgccttgcaatcccaacactttgggaggccaaggagggcggatcataaggtcaggagatcaagaccatcctggctaacatggtgaaaccccatctctactaaaaatataaaaaattagccgggtgtggtggcgggcgcctgtagtcccagctactcaggaggctgaggcaggagaatagcatgaacctgggaggcggagcttgcagtgagccgagattgcgccactgcactccagcctgggtgacagagcgagactccatctaaaaaaaaaaaaaaagaaagaaaactgaggcctggaggctacaggccttgcctagactgcttgtgtaccagcccaagactgaggcaccagttacaagaggcgtttttactggactcggactatttagctgccatttactcaacatggactgtgtgccccgtactggtctgggcattttgcctagaatctctcatctgattctccattattacctgcacttgcaggtgaggcctaggtcatgcagctataaatggaggaatgtgaattcatgcccaggtctcgagggaattcccatgacttggcttccatgatcctggccctgctggatggagccagcctcatggagggcgctcggcccaggctcagtgaccaccccagcctcccactgtcccgaggaccagtctggctgatgtcagtgacgctccactgcccccatgtggccactccaggccccaacatcatcctttccggctccctcacacctccttttccacaccaggcctgtctgctgtttgtctcattgtccacccagcagcaagagtcagcaggaggctgaattgaagacagttacaggagcatcctgtcttcctcccagggctttaaaagtcagaagcagctaatggacagtctcggtggagggctgggctgttgggacctaagccccacagctgcaatcactgggttcggaggcagggcctgacacacctctctccccctctcccgcttcctcccaggatcgctggttctggcgtctgcgcaataaccgagtgcaggagggctaccccatgcagatcgagcagttctggaagggcctgcctgcccgcatcgacgcagcctatgaaagggccgatgggagatttgtcttcttcaaaggtaatgtagactgtgctgtgggacagttccctgcccaaggtcttgggacctcctttttcccatctaaactggaagaggcggggtgggaggcagatgtcctcagagggcccctctagtctaacggagacactgacctctgacaaatcaagtcagaaagtgagactgagaatctgtatgtgccgagattggtggggtgaccagcttcgtccacatgaagtagagtgtgggacaagcaattgaagaccacccagtacctcatgggaggccatcgggtcagttctgtaagaacccagagggaagaggtcactcaagctggggaggtcgggggagggtgtgggagggagctaaggtgcccaccctgtacccagcactgtgctaggttgtttcatgacagttatcttgactcgggccagacctcagatgggtgagatacagatagtgagaagcaaggaaggcattccagagggacaacggctgaataaaggagcagggctgggatgtgtacggacggccacagggcttagaaggcccacctgatggccacggaggccccgccttggaaagctgtgagaaatggcccagaaaggtcatttggaggcaaatcctgaagagccctggctgccaggccagaatgtggtcttgatccattaggccaaggctggaaattcatggaatgtttccgagcagcagagagccagagggcaggaggtgacagacatggcaggggcagggcagccatttctgaggtggttctggagcgcgccactcatgaggcccaaatgagggaggagccgtgcagctgaagggcaggggacagctgccaggagagtcagagggcctcagaagtggctgaatactcggccaggcgcagtggctcacgcccgaaatcccagcactttgggaggccaaggctggcagatcacctgaggtcaggagtttgagaccagcctgaccaacatggtgaaaccacgtctctactaaaattacaaaaactagccaagcatggtggcacgtgcctgtaatcctagctactcaggaggctgaggcaggagaatcgcttgaacccaggaagtggaggttgtggtgagctgagatcacaccattgcactccagcctgggcaacaagagccaaactccatcttaaaaaaaagaagtggctgaatactgagaggagaaggaaagagagggtcaacagtgaggctaggactccctgttggggacctgggaggcagaaggtgatgaggagggagcccctctgtggtgcagatgaggagctctggggagccagccaatgcagagctgccggtaggccgagggaggtcagggtttctggctctgctgctcaggtccagtgggagagcctcagagtcgggtgtcactggtagcaggtttggggagtggtagtgcatatgcaaagtcatgtaagtggctgagatcaccagagaggagagaggagcaagtcacatgaacaaaagagggtgggactcggagcccaggcagcagaggcaagttgtccaggatctgtgactggcctcaggcttcgtgcccttcccaactctaactgggccaaggggctgagggcatcagactgttttcacctgacaccctgaagatgggcaaacggcactgagtgactggggaagctgatcctgggctcctcttggccacaggtgacaagtattgggtgtttaaggaggtgacggtggagcctgggtacccccacagcctgggggagctgggcagctgtttgccccgtgaaggcattgacacagctctgcgctgggaacctgtgggcaagacctactttttcaaaggcgagcggtactggcgctacagcgaggagcggcgggccacggaccctggctaccctaagcccatcaccgtgtggaagggcatcccacaggctccccaaggagccttcatcagcaaggaaggatgtacgtaagggccgggccagggtgggcatggggagccggttttatgtggtcctcaccagtgcccacgggcatactcagtgcccatgggcgtccaggtttgaaaaaacacctggtggcagacaactgcctcatatctacccatgttcacgtggtccattaattcacttaccagctgccaagtcacactttttcatctgcaggaatgattcacggcagagagacgttgtcatagactgacttcattccttcagacagcatttctcaaacacttatcctcagtgtactccagggacgccttgagttacccaatctgaaaagcaatgatgggcatgcatgtttcaaagccactttttcacagggctcgagggcaagaagatggaaagaaaaccttcaaaaaaaatttttttttaaattctaagagataaggtctcactctgtcgcctaggctggaatgctgtggcatgatcatagctcactgcagcctcaacctcctagtctcaaatgatcctcctgcctcatcagcctcccgagtagttgggattataggcacatgccactgtgcctggctaatttacatttttttgtagcaacagggtttcactatgttggccaggctggtctcaaactcctggcctcaagcaatcctcccacctcagcctcccaaagccctgggattacaagtgtgagccactgcatcaagagagaaactttttatgtttcctgaactcctcctagaagccatgctggccaccagcccccacgactgccatcagacactcagcctgtctccccaccagcctaggagcttctcaggaggagctgctagcctggccagatgcagagtgggcctccaggagtgtttgttaaatagatctccattgatatggtcaaaaacacagactctagagctggactggctgggttcgtaaccaccatagtaccactcactatgaatctgagcaaatctttaataagttttctgttttctcatttataaaatgataataacagtacctacctttatataatggttttgtgaggattaaagaagacaaattatgtagcatacttagaaataatgcctagcacaccatccatgctgtatattttagctgctatcgtcatcatcattgtcatcatcatgggtttcagtttatgtggattgacaggattcattcactcactccataataatagacagcttgtgtggtgggagctggggacgtagcagtcaacaggacttgcagacgtccaagtctaggggcataaagcaagatggcaacagacgctataagggaaagactcccagcactttgggaggctgaggtgggaggatcacttgaggccaggagttcgagaccagcctgagtaacatagtgagattcatctctacaaaaaaaaaatacaaaaattagctgggcgtggtgacatgtgcctgtagtcccagctacttgggaggctgaggccagaggattgcttaagaccaggagtttgaggctgcagtgagttacaactgcaccactgtactccagcctaggcaatggagtgagaccttgtcttaaaaaaaaaaaaaaaggaaataaatgctgggagagagcaacgagctagagggggccgtgttagagatggctgggaaggagtctctgaggaggcttcactgctgagaaagccaatggccacagctgctatttgttggctgtcttgtatacctgatgctttacgcacaagatctccctttttggggagcctcagagacaggtgacatcaaggaccgagaccaatgaaagccctagccacggtgggaagccagccaatgaggacggcctaagcaagctgctttgcccactggctgggccgctcaggctgttgctcgagccctggggtggttgcccagggagtgattggcagggctgcccagcctctctcccagaaggctcccaaaggtcctgcatctgtgttgtgaagtgatgtgtgccaagccaaaaaaatccataattgcagagaggtcttgctgtcaacacaaggtgaaatcttgctccctgcctcccttggctcaagcaggagccaggctgaggcttaatggagcccacatgagcggggcaagggggacctgtgcgcacagtgtgacagagctgtgacccaggcttgcgtgcaaggggtcctgtctgggcagcacaaagtgaaccatgtcccagttctccctgaagcccctctggtttcctagcacccgtaggatgacaggcggaccactccaggtcccgggtgcccccctctgcagcttcttactccatgactcagccaagcactgcaccccaaacctccaggtgtgcccaccttgcctcccttgccacagtgcctgtgccctccttttcacactgccccagagcaggtgccggaagtgtctgggagtggtgatgctgggctgtatttctgcagattacacctatttctacaagggccgggactactggaagtttgacaaccagaaactgagcgtggagccaggctacccgcgcaacatcctgcgtgactggatgggctgcaaccagaaggaggtggagcggcggaaggagcggcggctgccccaggacgacgtggacatcatggtgaccatcaacgatgtgccgggctccgtgaacgccgtggccgtggtcatcccctgcatcctgtccctctgcatcctggtgctggtctacaccatcttccagttcaagaacaagacaggccctcagcctgtcacctactataagcggccagtccaggaatgggtgtgagcagcccagagccctctctatccacttggtctggccagccaggcccttcctcaccagggtctgaggggcagctctggccagtgctcaccagggccagcagggccctaggctggggtcgtacagctgaagtggtgggtgcattggcctaggctgagcgtggggcagggaattatgggggctgtgccccagggtgggtgtctggcacccagctgccagccttctgtcctgggcaaactactccctacttaagggaataggccaggctccatccggaggcagggaccatgccaggaggagcccctgtggtcacggcatcctgtggtgtccatgaggtaccacagctccactcctggctggaacccagcaccctctgtgggaagccagcactagctctcatcccccatccgggagataccaccagtcctggtccccttttgccaacacctgctggtcagatgtccccctacccccaccccactgtcctccaaggctacaggacccctgcttctgacacagtgagcaacaagcctgggtttccctgctggcagacggcagatccctcaggaaacctgctccacttgtcagggtctcttcggagacccaggatttagggtcacatgctgcaggcagggctgtggcccagctgggtctgacaaggacccagctgtcacatcgtgaatatttaaatgtcctgtcactactgtcccattttgcaaaggctgcttgaggctttaggtgaactagaggtgactgtcttggtgatgaggccagcatagcggccctcccccaggcgacaaggaccaaggtgctgctaaggccactctagcgcccagacaccccagtagctgagctctgctcctatggctacagagctggggcagaagctgaccccatttctggaggaagatccgagtttgtgaccgtcctccactcccctctattgtcactgtccccagctttgctccagtctgtcacttgcagcctggagctcagcctcaccagttaggtgaggcagagatggctgcagggccaacactggcagagcctgggagtccttcggaaggggaccagggcgtctgaagtgctcagtgcccccactactctgaggccgactccagctactctgaggccgactcaatctctcggctggaagcagtgttttcccagagcttggcccttgctgacctcgctcactgggcccatcttcccacactgctcttagaaggacacccctaccggtagcagccccaagctgagggggctccctttttgaccttcactggcccgcccttcactgtctccagcaggagttcctagggcttggcctgccttgctccacagtacggcggaggcagccctgcttgtcactgaggagccctagacaaggccaatgggttcatcaatgcccactggctctctgccaaagccaaaaaggtgtcaggcagtctccagcgtgctggccgggtctcggatgccacccctgctcactgagcctgcatgggccttgcccccgaccctgtggtctctgggattggggtcggcttaccctgtagcacagacagggactcctgctgccctgggagctgtctcaagcaaaatctcttgtcccagaggtgcccatgtgggtccgctgtgtcccctgtcatcatccttgttttttctcattttggccaagggcaggctccctgggacaggcagggaacaactgcggagatattagtgattcataggtttgtacagtgttttatactttgcaaagcactttattagctcacacctgtccactcacatgaaactcgtgttaggccctgggaggccgacggtaactctcaccgtgccctcagatgaagcacagagaggttgttacttgcccgggccatccagtgggctggctgggtcttgtgtccccatctgtggacccctctagggtctgagatgagatgagaagtgtctcctgtatccacctcttcctggcctcccttcccccacttcctggtccctgtccactcctcaggttggtgctctcacttcttgaaagctctaggcacccccgcctcccgccaggctccccattggctcctggcaggccagctgagaatgaacaggagatggaggcaggcagcccaggctgcagaggtgagggatgtggggccaggcccagagggctcagcctagaggcttccaatctcagattctcctgcctgtggtcatctgtttgtccatcaccccaggacagggcagacagaggggcaaagcactgggggccccagagcctagcttcccctcagcctgggggacatcacagcatttcagtgtcagtcacattttaaactgatcagcctttgtataatgttttttaaatcatttctaaataaaacagaaatacagagtgtgtcatttccctgggatgagggaacaaagatcaggttccaagagtaaccttaggacgctctgggaagagaaccgggtcctttggggtgtctgggagctgcccacccatctcctctgccagaccggcggtcagatagcctccctctacaacaggctggccctgggggcccagggttattggggttccaggaacacagcctgatgatgcctccttacgatccaggatggagagcagcccccccaggagtatggggagggtcactgtggcacgggcttctccatgacctgggacatgacctgggacacatagtcaagagcacggttatcagcaatacagatattaataaaaggcagacgaagtcaggaggtcagcaactttgcgggcttaccaggaggcctgtcctgcctctggaagccagcgacagagagggatgcccccgacccagccagccggagaaagggatggggtggtcacgaaggtctgagctgggtctgggtgtaggctgggaagcaggctggggtgtagactgcgaaggcggccctgccgggacttctttccagtccccggcgacctcttcgaattctctgctatctctggggagcctcgggtgggagggggtgtaagagacgcagggacgtggggagaggagacaaggcaggcaagaaccacaggggacggcggacagacgggcgacatcctgcggaggacgccgtcagtaccaggaagtgcaggcgatgaggaagcgcacgtcgtccagcggcccccacgggctgggctcgggctggggctggggctggggctggggctggggctggggcggatgccggggctgttccgggccctccggcgccgcaggctggggctggggctggggctgggtttgcgcaggctccggggcgccgcggccgccgcttagctgagcccccatggtctgcaagaagagaagccctttaaggtctgggtcgccgggacaccccgctagggccccgccccggctctgccctcacctctcgcagccagacccgcgggtctcccggaacccacctcggcgtcgggaggagctggcgccgtgacgccaccaccgcgtaccgacctcaccctccgtgcgttggagcggaaagaagggactcgaccctgtgcttcggggcggggctccgcgaccgtcccccgccaatcccgccccagcgcctcaaggccccgccccgcgcaaggggacggaatgcaccccaacagcctccaagacgcccaggccaggaggacgctgggaacccgctgccccgccccacgcccacccaggaaaagacctgcaacctccatccaccttagtcaaagaatgccccgaagccagatgccccagagctctcacaggggacttgcccagctcaggggaaaatcggaacggactctctgcctttcaaggccagagaagaccggcgcagaagtcgggtgaaaactgtgagaactagaccgggcgccgtggctcacgcctgtaatcccaacactttgggaggccgaggcggtgggtcgcttgagttcaggagtataaaccagcctgggcaacacagtgacttcgtttctacaaaaaaataaacgaggcgagaggatcgcttgagcccaacaggtcaaggctacagtgagccatccttgcgtcacaacactccagcctgggtgacagagggagacactgcctcaaaaagaaaaaagaaaaaaggagaactgtagtggagagtgtttcttgccccaggatgaagcctcacatcctgatggtagaggagaagggaatggcgtgtgtggaggtggtgaactgggttgggtgtgtgttgtgttcatcccaccctatcttcccagaatgctggaacaactggagagtgcagggattgtacacaggctgagggccccaaacatcacattcagaatggcccggagggaactgcactttaatggggtggcacaggacagcagaaccctcagccagcagccacagggcctgccagccagcacaacagagcaggtttttgcagtaatgatagatccaggcgataagcacaggtggaaaagggttgggtgcccagcccctcagtcccagtgagctctctgccacctccctgccagcatccggtacagattgggcggaatgtggagaaggttggccacagtccagagccaggagcccatggaacaacttggaaggtgactcaggtgaggctgaagagaaaggaaagcgcacggtcagtagctgtttcacagagcccacctcactctcaagtgaggtgcctgcctcagccctcatcccgggaccagctctgacaagctgctcaagcagctactgctctagtatcctagccctgaaaaaccacaaagatgaggattagcagatgctcaagaaatattttttgaatatgctggctcttatctgctcagcagtgtacagatatgctctcacactcgagaagctaccagaacaaactggtaggctcccattctagatgacatcttttccccatactctcaaaatgcaagttaacccccaaccctgagcagaagaaaggagaggccccaggtacctgtcaatgagggaatcccgcatgctggtggcaatggtgctaggctgggcttcattcagcttgaagacactctccaccactgacagctctgtgctggttgtgtccaggccacagaaggcacaccagtcattcaccaccatcccagcagcaatcacctcactgcctcggttcacagtccccgcctgccaagggatgggctcaatgtgagtcacggcaccaaattctctccctcctcaatgaagactctccccaaaccctgctcctccctgacctgcagccccagtcccaaactgtggcaggtaatgacccagactcccaaacactaggcaaaaggatctgcctcgggagacggggttcagaggacaggaatgcttaccacaagggggacttgaagaagagaggacagctcatcctggtcttcaattgaagtcttgggatgcaccagccctccctgattgctgaagacacagtagcttcctactagcacctggtcggccactgtctgtctgaagacttccaccttgagcacatctgccagaatttcttctgtctcctgtcaatcaaagatattgtgttcagggctcagaacttacagccccagaaccaaggttctccatgcccagaagcatccaggccttggctccctgagcccctcatttctcctctgtacctcatatgaaagcctcacccagagaaaggaggaagtacagcttagagcagagtcaagggcagctgtgaagcccctaatattcatgcatgccctgaacagctggaggctggtctcaatatcacttctttcccctctcacccacagtcaaaagttcaacagtcaatcacctatcctggcccaggatgcaggactggatggttcaatctccccaatcatgaaggattcataccctccccagcttctttctgacacttgataaggcctctgttatcactattccaatgagtacctgaaactcaagagcccatatagaaaaaccacaggagagacccctaattgctgcctgttgggaaagaacagtggctaaccactgactaggatggccctgtgactcttgggtcaagttgggctgcctcaccctgtccaagtctgggtggaccaaggccacgtagtcattgcaggtggtgacattgcccaaggctgagagccgctcctccacccgcctaatctgcactgtgtctgggaggctgttgcgaatgtgttgcagctcctggtcggtggtattgttgggtaccaggagaccgtgcctgttccctggagaaacccaaattagagggtgaatacacaagatgcctgctgagccctaggggctgaggataccactcagcccagcccaatcagctttcccaggaaagctttaggcccagagcccagccctccaacccactgatctggaaaacacccagggcaggccagagaccacccaggaatcccaataaatcctgcctacttcaccatcaccaactgggagggaagctgagctcttggcattagctgtatattttgctacttaaaaactgagctgccgggcgtgttggctcacgcctgtaatcccagcactttgggaggctgaggtgggcagatcacaaggtcaggagatcgagatcgagatcatcctggctaacacggtgaaaccccgtctctactaaaaatacaaaaaattagccaggcgtggtggcgggcgcctgtagtcccagctactcgggaggctgaggcaggagaatggcgtgaacccgggaggcggagcttgcagtgagccgagatcgcgccactgcactccaacctgggtgacagagcgaaactccgtctccaaaaaaaaaaaacaaaaaaacaaaaaaaactgagctaacactacacacatagcagaatggctagattattattttttaaggcagagtctcactctgtcacccaggctggagcgcagtggtgcgatctcagctcactgcaacttctgcatcctgggttcaggtgattctcctgcttcggcctcctgagtagctggaattacaagtgcgtgccaccacacctggctaactttttgtgattttgtagagatggggtctcactatgttggccaggctggtctcgaactcctaacctcaggtgatccgcccacctcgacctcccaaagtgctacgattacaggtgtgagccactgcccccagccagaatgactaaaatttttacaagtcatcaattccaagtgttggcaaagatatatggagcaactgaactctcatactgagacaggagtgtaagttggtcaatcactttagataattatctggcatcatctgcaactactactaaatagtcacataacctgtgactctgccatgccactcttaggtatcatatacccagtagaaatatgtacatgtgttcactaaaaaaacatagcagcactattacttttttttttttttttgagacggagtcttgttctgttgcccaggctggagtgcagtggcacaatctcggctcactgcaagttctacctccccggttcacaccattctcctgcctcaacctcccaagtagctgggactacaggcacccgccaccacacctggctaatttttttgtatttttagtagacacggggtttcaccgtgttaaccaggatggtctcgatctcccgacctcgtgatccgcccgcctcggcctcccagagtgctgggattacaggcgtgagccaccatgcccggccagcagcactattcctaacagaccaaagtgaaaactgcccaaatgcactgtcgatggaatggatgaatacgttgtgatatacttacacaaaacacaccatacagcaacaagaatgaacaatctacaaatacacgccaatcaatttctgaattccaggtcactcccatcataaaatacacaaggactaagctaaaatctcccttgttgtcagaacttgcttcaagtcctaagggcatggttagagatcagagtattttaactgaataggaaaatactttgaggtcactaggcttaagtttttgttgttgttgttttttgttttttgtttttttttgagacacagtttcactcttattgcccaggctgaaatgcaatggcacaatctcagctcaccgcagggtgagctccacctccagggttcaagcaattctcccgcctcagcctcccaagtagctgggattataggtatgcgccaccacacccggctaatttctgtatttttagtagagacggggtttctccatgttggtcaggttagtctcgaactgctgacctcaggtgatccacctgcctcgacctcccaagcaggcttaagatttttaaaaattaaagtaaaagtaaaaaaataaaataaacagacttctaaaagtgacctcaatgagcagaactaagaaacaatgggcagcagtaatggaagacagatccagcttaatgaaaggaccggccgggcgcagtggctcacgcctgtaatcccagcactttgggaggccgaggtgggaggatcacctgaggtcaggagttcaagaccagcctggccaacatggtgaaactccatctctactaaaaatacaaaaaaattagccgggtgtggcgggatgcgcctgtaatcccagctacttgggaggctgaggcaggagaatcacttgaagagagtgttgcagtgagccaagatcgtgccattgcactccagcctgggcaacaagagcgaaaactccatctcaaaaaaaaataataataataataaaaaggaaaggaccaacgaccagaattaacagtgctgacaggtaggaaggtagggtagagatgtggtaaagggaatttaagattccaacgtaactgagcaggaagaccgcatatcttagctaatctttacagagacagaaatggatgcttagaaagagaaagcaccttgcccagtcagtggcagggagagatgagatacaaatcctcggctgggtatagtggctctcgcctataatcccaacactttaagagaccaaggtaagaagatcacttgagcccaggagatcaaggccaggctgggcaacacagggaggccgcgtctctaccaaaaatgtaaaaattagccaggtgtggtggcacgtgcctgtggccctagctacctggtaggctgaggtgggaggatcacttgagcctaagaagttgaggatgcagacagctgtgatcttgccactgcactccagcctgggcgaaagagcaaaaatctggcctcaaaaaaaaaaaaaaaagagaaaaatccttctccaacactaggaactaggtgtggaacttactgagtcacttaggtcaagtctcaacttcctcatcagtcaagttaggccagtaactcctaccttctagtgtctttgtgacgaaggaatgagaacaggagtgaaagcactttacattatttgttattactattatccagcagcctttgctagagggttgccccgatctcctgacgcttggcctgagagattctatagtgcccagagataacagatgataccctgggaatccctaggtcactccgggttccctccgggggtgtaattaatggtgcttggagaccactccctccctcggcgtcctccacctgccttacccacacacatgcgcccgatgatgcggcagccggcgatagacgcgtgcaccacggggatggtatcggagagctcgccctcgaacacactgtagggacatggactcggtggtggcggggcagaggggccggcaccctcccactgccggagctcttgactcctgcgcacgcctccccgccaccgtaagccccggggctcccgccgcacctgtagaagttctctgagcctccgatcgctaccagacagtaggtgttggtgagcttggcaaagcagccgatctcacagttgttctcgaacgaagctcggaccgccatgaggcctaggggcggcggaggcgggagttcaaggccggcggatcctttcccaagtatcccggcctccgtccctcaggccccgccgcgaccccgcccctctcggcctcccggcccctccgtcctcgggtcccgcccactgggcccccaccagaacctccggccctgaatcctctggcccccacccctcccgacccaggaccggagctgaccctcccaggttcccctcacaccagcttaccaagtaaccagtaacaagctccgcacgcggcgactgtaccttggactccctaaaaaggtttccgtttccacttccgtccagggagacttccgggagagcccggcgctccccgccacgcatccagcccctctacctccggcctccggcggactctatggtcgcgagcggtctgggcgcgaccccgcctggccccacgcctagcctgctcgcgttcattcattcattattcattcaggagctttttaggagctgtcatcgacctagacctccggctggtcggttgtgaggcatgagggagaggaggggccaggagtgtctcgcggaagggttgatgatggaggtattgatggaaatgaagccggaggaagggcaggtttggggaaagggatgagtccagctgtgccttgagggacagaagtccatgtctggagcccagcaggggagtggagtgctgacgaatgagatgaggggctgaagacgggtggactagaagaggctacccatggagagagttccaggaggcagaagtgcggccagaccgaggctggagaaagagcgcagccagagacggaaaggcagccaggctgcaggtgctggagagaggggaggactgaggaagcaggggctcaggaaaaggctggaaaggggtccagggtgggcaaggatgtgggtgctggttggcttccacgatgtgcctctcgcacggcctctatcactcactcagcagccaacttctgtccccaggatagtgatgggggccaagggccctgctgcacacttggacaggatgaacttggcccacattttgtagaatctgcaaaagccccgggttctctcaaaatgtcacagtggtaacttggagcccctggactcccccaattcctccttcggcattcaccctcctccaggggtttccccataattggcctgaatggtgcccttcccattcccccaacgtgtccctcccataactcctcaaagttcaggatacaccaggcgctgtgattcacaataaagtctgcctttattgatgtgtatcatgtttactatcccgggtaagtggtgagttcaggaaaatggcccacaacctgtcacagcctgtacttcaagagacactcagcaagatgatgacgacgacaatgatgatgatgatgatgatgactcagcaagatgatgacgacgacaatgatgatgatgataatgatgatgtgtgtgtgtgtgtgtttccgggtatccacatactctgctcttcctcactcattcacctcagacccactcagtcctctttagggcatctctttcacctgattctctctaccaaaaatttttctaactctctcctccctctgtccaaaacctccccatccttcagggcctggctcaaaggccacctccatctcctctaagaaagttttctgactactccaccttctccaggactctctgccctttgttttctaacaccctctgtaactggttaacctttaacttgatatggctctgaccccttctccagcagcttgtgcatttcacctctgtccccaggtctgagtgtgacccacctgtcagctctacaggcccagcacagggctggaaacacagcctagattcaagaagatactagttagggtgtgtgtgtgtgtgtgtgtgtgtgtgtgtgtacacaagaatcttgagcccagagagtgtgtctgacctgggtttctagacacctcccttccccagtctgggacctgagcaagtccagagtctcggtggacagaggaggggcctgcccttgccagtgcacccccgatgccagtcctttggctaggactcaaagcggcttcggagctgcttgaacttggacttgttgtacttagtgatgaggtccagtttgctgtgacccagggtcagccgtttctcatccctgaccaggtcactgttaccaccattgagatggccacccttgggacccccaggctcagttccctgcctggccccgtgcaactgatgatacttggtgatgaggtccagcttgctgtggcccagggttagccgtttctcatccccagacccagctccagccgtgcgagcagggcttgatatcgggagaccattgggcccaggcccctcaccacggaatgggccgaactttgtgatgaggtccagctggctgtgccccagggtctgccgccgctcatctggtgcccgtctggcaggtctggctgaggagttggtttcaaggggcactctggaaccctgggccttggggtactgcatcaggaggtctgattggccacggctttggtttagggacagcctcctgtcctccagggcccgatcaccaggtctgagggaacccaactcaggggcacccccagtacccagggctcgggacaggagatccagctggctgtcggcctggcttggggacaacctcctgtcctctggggcctgctcgccaggccgaagggggcctgagttgggggtaaccccagagtcagggtctcccacttctcgggctctggggaaggggacaaggagatccagctggccacggctctgacttggagatgccttcttctccttctcctccactgtctccagggttgtgccaggtacccatcgaccccgcagggggctgggctcttggcttcctgggagcccattctctgggaaccgggacagagctggggcaccccgatggaactggaggaggggccgggagcgaggaagcagaggtgaccccactgccaaggttaaggggctggtactattatggttgagggcaggggaggactgggaccatgggtatgcccctagcttgccgagattggccctatagagcccaggaggggagccgtggttagggtctgacagttggcgatgtagggagggctggccactggcctcacggcgggcaggacccagggacgaggacaccacacccgtatcactgcaatcaccacctcctggtagagcgaggtaggaggagcgacccataagcggtgactgcttgatgctgctgaggctggtgctggagggcagggacgacgtggggcttgggacatcaggcctgaaggctagggccacagggggaggacgcagtgcccggggagacagcgggtcctcaccgccacagaagccctccacaggctgcgactcagcgtacagacagcggaactcccggtcaaagtcttccacgatgcggcccctcagctgcagcaccatgctagtgtgggcctggctgcaaagccaggtgaagctgggggcagagggacaggggggtcaggaggcaaagtgcaggatcctgggggtcggcaggagtcacagccaggggtgcatacctggtccagcacgctagacccaaaccccaccaccacgagggctcacagcgaggggcagagctccaactccagagtctgtgcttgccctagccctgcttagtgtgtgacctcatggaggccccaacttccccatctgtcaaatggacttgggggaggttccctgaagtcactccagttccaatgggcatagtcattttctataccaagggtattaaagtaatcattcccctagagtgagctcctccagggccgatgcccccgacaccctcccctgagcctggcatgatgcctggcacatggcaggtactcagcccgtgtccgaaggaaaggatgagtggagggaagctcagagctgccagccagtgatgcagccccaggccccccttgcctcctcgtgcctgctcacctgtaactgcccgccaccacttgctcacagtcaatgaggacgaacttctccagggcctgccccgtgaagcggcggccagccttgctgcagtatgtgtccccacacgtgctccgcacacgcatgttctaggtggaagtaggttgggggtgaccttgagagagtgaggctcaagccatgtctctgccccatggggtctctaaccccagacagctaagggaacccaccccccactcccagtgccccccagtgctgactggccacccactggctcccctgccctccctgactccccgcccacacccctggttactgcccctggtcctcactgaccggcaggtgctccccattgaggtccatcttgtagcacatctccaggaagtgcctcaggtgctcctgggcaaggagcaggtacacagggacaccacgccggcttgaggcctccatgaggtcacacagaagctccatgtcagtgaatatgtccatcaccacagccaccacctgggtggggggaggcacacgaaagctcagcgctgcccagggcactccccacatccagccaaacctggggcaggaaactgggcgccgggaaaagagtactggactgaaaatcaggaggccagagccttcaagagcaagtgaacaggaagggcacttagcagtgacctagcccagggcttcttaacttgggcacaggcagatttgactgtcttcttttttttaagagtcagtgtctgtctcactctgttgcccaggctgcagtgcagtggcgtgatcatagctctcttctgcctagaactcccaggctcaagcaatctcctcccaactcagcctcccaagtagctggtattataggcatgtgccactatgcctggctaattttcttttcttttttttttttgagacagagtctcactctgttgcccaggctggagtgtagtggcgtgatctcggctcactgcaacctctgccttctgggttcaagcgattctcgtgtctcagcctctcaagtagctggaatttcaggcatccaccaccatgcccagctaatctgtatttttaatagagatggagtttcaccatgttggccaggctggtctcaaactcctgaccttgtgatctgcctgccttggactcccaaagtgctgtgattacaggcgtgagccaccacgcccagtcgctagtttttttttaattctaattttttgtagagatggggttctcacaagctggtcttgaacccctggcctcaagcgatcctcccacctcagcctcccaaagcactgggattacagtcaaatcccagcccagatttgactgtcttgaacccctagctgtttgaaagcatttgtgtgcatccttctgtgcaccgagtgtttatccatcatcagattctcaaagatgactgtggatcagctgtgctagtccaacactccctctgcactgagccccagatgggacagcagtgagaaggagaacccagaccccaattcccaggcaagttcctggcactcccccgactaactccagcccagctctgacccagggactgtctgtctgaggctcccttctccagggtcacagctacaagccacttactggggtcttcgctgccctttcccagtcctgcctcagtttccctgtgaagccacagaggtctggtgtgaccccttacactgcagactcccttacttgcacccatgccaaatggatccaagttttctgctcagttgagggctgggctggggcttgtgcctccatcccatataaagggctgcctcaaagaggcccctgaaaccttcttggcacctcccagcccccagctggcctttcttcccatggcatatatctgctatgagagtcttctctcccaggcagggccgagaggcaggaggtacagagcatagcactccagctctggagtcagaaagaactgggttcaaacctggactctatcacttcctggtgacacagctttgggtgagtcccttcacctctggaagcctcaccttcctcatctgttaaatggagataatgatagccatgtctcagagttacagggaattaaatgtgaaaatgctcaagacataacagagctctataaacattgggctgcagggcaacgcagcatttcccaaggtcactaggagtcatgacagcccagtgcacgaacctggctcctgacccaggatagaggggtctaaatgggggctgagaaggcgaggcactgggggatgccctagttcacagcacaggcctggccagggtgggggaacaaggacaggcaggaagatcaaagaggcaggggtgaggaggacgacagcagcagcctcactaataaccccattcctgatgccaatcaggcctggccgtcccctgcctggggcacaggaaggcttgccagggaggctctggaagtaccggtgggatcccagcatcctggcttcccatctctgcagcaggagcctaactctccctcaaaccctgccagggatcatctcgtccattcccctggagtcggaggccagggcttcagaagggaagctgtgctcgtgtgtggccagagcctttctgggtgctgaccacccctacctgccctcccaattctctttctcctgagctcccgctccccatcactgagcccagcagcctcctctcctccttcctccttggttccaaagcccagccctcaaggccacgccaaagaggcccacacgctggccccttcccctgcttcaggcccagctgcagatgtggtgcaggagggtagggggcaactagggacctgagccagcaaggagggccggactggtccccaggacccaagtcagagagcccctgtctccccaagccctgagctctatgtcaccatatggacctccctgggcaagtcccaagcccctctctggcctcagtttcttcttctataagtgaaggaggtgactcagatgttccccaaggttggagttcttagtgtggggatcataaaactttttgagaatctgatttaaggcagtggagcatcttccaaggtaaagatgcagcgaggactcctccctccaacctgcaccacttcgtgtgcatttcaggggattgtggagtccctgacacccatgccctgttctatgctcatccatactattcctgggtaccaagcagttgccaaggtaaatatgggatgtcccccttctaggagtttgcaatctaatagtgccagaggtgctggtcctcattctgcccctaagtcgctgtgtggccttgggctggtcccttccctctctggacctcagtttcctcctctgtgagatgagtgatggagagatgaggcccttaccgtgtgggcctggctgaaaaggaagcgcagcaggtccttgatgttcttggccttgtccctctggaagtggaccacagcctgggtggggctgaagcctgtggcctgtggcacctcgggccagcccaggtccaggtctggggggtctatgtcagaggccatggggaagtaagtccctgaggtgacttcagagagcaggctgaggcggtctggcccggaggcctcctgcccctgagcctcgctgagctcagggcccccgcgcacatggctggtcatgtagtccacatccagggcgctcaggaagggcagctcccgctcctcggagatgacccgcaggtaggcagcctcaccccgctccaggagggcgtcggccgccagccgagccgcctcgctgtgccgcagcaccagcggtgagctctcccgccaccacggcagcttcagctcttccacccggccccgcaggggtcccgccatgccctgggctcccaggaccccaggccccgggcctccgaacatgcctgccacgcggctgcctcacccgccggcagggcccatggcccgcacgctgggctggctgcagcaggaagaggagaccagcagaaccgccttctgcccgcccgctcgctgtgtgtgtggcagggcccccaaactgttgccaccctaaatcagagccacgctccaccctattgcccctggcctctggaacctgtcaggtcagccccacctgtctgcctgtgttgggactcgcctgcccagggaagcggcagtgccaggccctcggtgcacactcctgcctccctctcttcctcccagcaacgccgccccatccccaccaggctcccagcaagtctccaaatgctgacttcccgggacccacagaggttgaattacagccaagaggggcccaggcgactcaggaacacacactcacacgcacacgcacacacactgcaggtgggtgagcgactcaagacacccaggaaaagacatgaacacccatgcagatggacacactgacaactgaccgatacacagacatggagtgtgggctgacacagaccgaccacacattgtaatcacatccacttgcataaactcttcacccaaacgccgatgtagagaccggccatgacccccacaacacataccacagtggatagcacgtgccctggctcaagtctgcaaggccctgagagctgaacgactgtcacatggaatatccaaggacatcaacgctggtctgtcccccagccagccctctttttgctcccataatcgtcctgccactctccatcatcttaactgtggtgctcacagccccctggctctctcccaccccggctcggagctgtccttcaagaacctagagcagtggctctcaccctgaccccaggggtggtgagaggtgatgaaatgcagatccccgggccccaccctcctggaaattctcatccagaaggtgtccgtaggcttctggagcttgtcttttttctttttctttttgagatagggtcttgctctgtcacccagtctggagggcagtggcgcaatcacagctcactacagctgtgcctcagtttctctggactcgagcgatcttcccacctcagcctcctgagtagctgggattacaggtgcatgttaccatgctcggctacttttaaaatttttttagagatgggatctcactatgttgcccaggctgatcttgaactcctggcctcaagcaatcctcctgtctcagcctcccaaagtgctgggattacaggtgtgagccgccacacctggccatttttcttttttaattgagacatgatcttgctctgtcacccaggctagagagagcagtgatgtgatcatagcttactgtaacctcaaattcctgagtttttaaacaagtgcccagtgcactgtgggcagtgggctaaggcccacccctgagacatgctgttccagatggctgtgcttgcaacacccttaactccagggatgttcttggcctggtggtggccagaccccagccttcttcccctcctccagggctgagtatgaaaatggttggaaggttgtttcagagaatgggcggacacactgcaaggtcaggaggcaaacagggcaggtagatttctgacctctgccccaacaaagattaaagtcctggagcatgtaccgtgtgtccttcggaggatggtgagcagctttgctctggggaagggggtgagcaggtgacagctgcagctggggagccaggctaggcagaagcggtcaccacctttccacggaggcatgaggtccagcgaggatggcgggaagcgcagaagacctaaagccgtgcctcgcagcctgtttagcactaagcgcacttggtttatctggtctgcgatcatgtccggaacacagggtcttctgtgtccaaagaacttgacacacatatagtgggagggagctgggtgggatttagaggttccggagttgagctgagccctaggaccaaaggtgaatggggctagggctgtgtcttcaaggaccctataagtgaagggcctgggggagcatgggggagccacaggtcaggagttatggcctactccatcccatcccaggtgcaggagcaccgggcactccaaggaggcccttccatgggggtgaggaggctgcaagaggggcagaaggttgagtaaacaaagccagaccgtgggagggtgatgagctgtgggggcagccgaggtggcagggccatcattagggccttatctccagatttgtttgaaggggaggaccaaccagggtcttatctgggtggtagaagtgctcccgggagggagggaggcatgtttgcgtgtcactgagttagttttgtttatcttgcagtgtgtatacatctacttcaggtacatatctttggctctgtatcttttaattgtggtaaaatacgcataaaatttgcctttaaaaaataattcgtggccagacgctgtggctcatgcctataatcccagccctttgggaggccgaggtgggcggatcacctgaggttgggagttcaagaccagactgaccaacatggtgaaaccccatccatctctaataaaaatacaaaaagtaggtggctgtggtggcaggcgcccataatcccagctacttgggaggctgaggcaggagaatcgcttgaacctgggaggcagaggttgaggtgagctgagattacgccactgcactccagcctgggtgacagagcgagacttcatctcaaaaaaaaaaaaaaaagaattagagatggagtcttgctctgttgcccaggttactctcaaactcctggcctcaagcgatgctcttgcctccgcctcccaaagtgttgagattacaggtgtgagccactgcaccaagccaaaatctgctattgtaaccatttttaagtggtacgctttaagtgtcgtaagtgcattcacactgtggtgtaaccctcaccaccatccatctctagaactcttctcactttgcaaaactagagctctgtacccactaaacacgaattccccatttccccctcccccagcccctggcgcccactattctgcttcctgtctctatgaatttgactcctctaggtatctcatttaagtggaatcatacggttttgtccttttgtgactggctcatttcacgtagcttcatgtcttcaagttccttcacattgtagcgtatgtcggaatctccttccactttaggctgaataacatcccattgcatgtatgtagcatgtgtgtagcacatttagctcattcctccatggatggatgcctgagttgcttccaccttttggctgttgtaaataaggcacaggtgtacaaatttggctctgtatttttgtatacttccccccacgcccaggtttgtactagattccttttttgtacataagaaaccactgaatattggcaatttcatatggtttgactaaatatatacaggtgtacctatgcagaactgtacctgtgcttgtatgtgtgtgcacgtcctgtctgtgatgtttgtgtgcccgtgtggcacggcagtgtgcatggacctgtgtgtgcatgtgtgtctgggtggcgggatagtccttgagtcggactctgtgttgcggtactggggctgtgtgtacaggaagcacaatggagaggggcaggggtgggaagactttgttgaaaggcaaggggttccagtggatcccggacatcctgataatacttgtgtgcaaatcaaatcaaatccccccaggctgcgggaccagctgcctctccctaggcagcccctccctgtgagttgagttggtcaagggcaatgggagggcagacaggtggctcccggcattggggctgggcctaggggtggtggccaagggtgatgggagcgtccagacagacccaagccctgtccctggctgaggtatgtcaggcacaggccccttaatgactgtaattaagaggaaggaaactgttttcctgtataggaggtgtgtcaggcgcctgcctggcatcactcagctgtcctggaggccacttagccttgtctattgtctctcacaagccaagcggcgtctgggcaggcaatgtcatgtagggtagggggagcagaggctgggttgcagccctccaggtgcaggctgctctgaggccagtgctgccgcatacctttcctctggcaccccgggtcaggagagacagggctcccgcagaggagcagctgggactgtagggcccggagtgccctaccagggatttggagtgcacccaaatcccttgaatcaaggcaaagtggacacatgctgaagagtccccgaggctggcttgagccaggtagcaaagggtgagaaagatttcaggtgcagaggggtaagtggagtgttcctggctggagaaagagggcaaggacatgcccaaggaaggcaggtgggggccgtggtgcaggggaagatgctaacaggaaggctagagccgcactaggaagagctcgagggccttctaaagtgctgggttcttacctagagatgatggcacaaaggctgggaagactccagagcatcgtcctaggataactcagaaacagctccaatggcgagagtgggccaaagcaccagaaacaacccacattggttgaacccagtgtggttcactgttcactgagtgtgacacaggtctcaggaggtcaccattccgcactcttgtctcatcctgataccccatgggctattgtgccactggactgagtcgaccccctggtaggaacacaggctctgccacttaatgggggagccgaacaatcacaacttctctgagtcacagtggctgactctgtagagtgggacccacactatctcctttacagggttgtcttgaggaatatatgggctcagctacgccaagtgcctggctgagagcagctgtggttgctcagtacatgctgaagtccagagctttcccagttgtgaaaggacaggggctcgatgaaggcctgaaagctcaggaagccaccgggggagctctcctggtcagtctctggttccttctagaccaaaggctggtgccaaggccaacacggtcccagccgagtcagtggggtgtggtctgtcaccactgcctctgagatctggcctctcatcacacgcctgctcacaggaggcggggtgtccatctgtctgtctcctgcattttatttctccatttgttttgaacttgggaggggaagaaagaggtgcatctgctgactcctggagccccgttattgaggcagcctccccttcccaccccctctccctctgtccaatcctcccagcatggatttagtgtccaccttcagccggcaggtgacccaaagatgagtaagagtttgtctctgccctggaggagctcacagttcagtggggaagacagactcataaataattataaaccatgcattaggctgaggtataaaccaagctcctggggtttagagcctggacctattgaagaacctcagacgagccatggccccacctcccgccccttcaagcaaggcacagcgcagtggcgggccctctcccaagtgtgaggtgaatgctgttcctggccacagggagagaaaaaaagtaagagcacccagcccaggcccgtgggtgctggttcctgactgaaacctgcagtgaggcctggcagggcctcagcctcccccgtccaacgcgctggctgggcgggaggtctccaggtgcttccggcgctaccgctgtagtccatcacttgttgacgccacgggttggtgcttggaggtcccttcctggaaattccccagccagggtctccaggatcttttctccttgttctcccctccacacggaaaaggggagcccgtggcctggtcagggtctgggtcctaggctcaccaacgtcactccagggaagtcccctggaagctacagagaacctgatgggggagcggggagggtcggggccaggggcctgaggtctggcctccccctctctaaggccaagcccagtggatagggtgggtgaggcatggtaggtgcagtggacagactagaagtgggaaccagagcaataggtacaggagggctgctcccaggggaagcgttcgaacacccctgccagctccacttccctcccactccacccccatagctgataaactctagatcgagaccagctggcatgagctctcccttcccccttagccctctcctcagaaactccttttccccctatcagtcctcctaatcgctggtctcaggaaaggattcccttcaccacctccaaagccaggcccttgttctcaagatcaggcttccatttccagagggatctcatcggagtccctaacactcatgggaagttccctactccactaagtgcttagctcatcagggtgcttcctgcccccaaatacatcttcagcacgttcctgcaaacccccttgtttcaccccctcttccgcctcctcccagtatccctccatctcttctcagcatgctgctccgagtctccttctggaagctctcctcttccctgggtccagtctaccttctgcactggtgcctgctcttcccgccacctcctgtgaatgctccttgcactcccaacccagtctcggggctgccctcacctccgggagctcatcaacttcaggatctctatacccaagacaaagccaacatccttcgtccctgaggtccatcctgaggttcgccaaggtccttcctcccccatgcccttgccctccctggagcatctctagcatctgaagtccatctgccaccagactggctccccacagatgcaaccaaggtgcaccaaaagcaatggagtggaacccagaaaaaatgactgttcagctttgctgcagggtcaccttgcaccagcaagcagattcttctcagtgcgcctatttccctattgcatcatgggtgcagcaatccctgccctgcccagctcatagggtgctgtaagtttcacttgaaaaaacacaacacatggccgggcgcggtggctcacacctctaatcccagcactttgggaggctgaggcaggtagatcacctgaggtcaggagttcgagaccagcctagccaacatggtgaaaccctgtctctactaaaaatacaaaaaaatttagcagggcttggtggcgggcacctgtaatcctagctactagggaggttgaggcaggaggatcccttgaacctgggaggcggaggctgcagtgagccgagatcacaccactgcactccagcctgggcaacagcagcaaaacttcatctcgaaaaagaaaaagaaaaagaaaaaacacaacacagagaggattcttctcctccaaagaggatcttctgccagacgtcaccatctctgggccccagtgagttctgtgactgcactctcttcaggctccacattaggcctcaagtcctgatgagttttttctcggaaatgtctctggggtttgagcttccctttgaattccatctgtcacccccggcatctcaagcccagatggctaaactcccttcctgacagagccaatccatcctggtaccactgtctctccactgccatcatgccccagtctttaccaagaatgcgcacagtggcttcctgctgcctggcagctgatgtgtgatctgtgctacccctactcatggtcccacctgatctctgcaacccttccttcccttagcagctaactcaacagttgctgcagtctgaagagcttcctgttctgtgccttcaactggacagctagtcctcaattcccgttttcctacctccttaagcctcactcttcacagcctgaagcggtggactgggtcagagccaccatacagggtacatctgggcattcccctcctggaatatgagcttaagaatcctcacctgcaaggcggcgagtgaggtgacaagtgaaaataccaagcaagcctggcatggagggaaaactcaaaagatgctggctgaagtgcggcctgggcttcaacctcagtttaagattcaccccgtcttgtcgtacagcattgctatttctcatcggaagaaatagcgatgatttcttttttcaaatttttaggtaaaacatcaatcttaggggtactgttcagtgtttctcatttgaaaacctctataatacagtcttctctgaagagtaaggaagacatatgtttcttctgatgagtaagtgtacttccttttatgtgacaatgggaactctacaaccttagggctttccattttccacctttgaccaggaagctcagagcaaggtctcatactcaattgcaaatctcctggctgacctgggggagggaggcagggtgacatggggacaaagcagggtccccagggtctgtcgtgggctggagcactcttggccccttcttatcctcgatcactctttctctaggcccctctaagcttcagtcccctcacttgtgttaaagggataataaaaatgatgagggcaatacctgttttacctgattgttgtgagacaatgcatttacagtattttataaaattttaaaaaagtcatatgaaagttgctcattagcagtccaggttttccaacataattattttccctctttttccctcccaatacctggatctgatctttcaaactttaaggatttttttttttttgagacagggtctcactctgttgcccaggctggagtgtggtggcatgatctcagctcactgcaacccccacctcctgggctcaggtgatcctcctacctcagtctcctgagtagctgggactacaggctcatgtcaccacacccagctaactttttgtagagacagggtctcactgtattgcccaggctggtcttgaactcctggactcaaccaatccgcccacttcggcctcccaaagtgttaggattacaggcatgagccactgcacccagcctacaattttattacaaactgtgtctcttaatctgctgtgatcttttctggaagaatacagaatacaaatattaataaatgacaaaatcattcctacagagcagtctccctgaaggcaagaaattgtgtccttcacttgttttgtacaataatgagttacactagaaaagcatttagctatggaaagaactttccattttggttcctatgctaagaccaaagggagtgctcaatattaagtcgctaaaataagtgaaactgtatgggtcacactgagaatggtccagaagggggctttttggttggggttgtattgataacacttggtgatttagtcacacattcattctttcatttatccaagtatacactgatgctgatcatgaatcaggcatttggctgagcactggaaaaacaacagtgaccaacacaaacacagtgtccactccacgctgaggcagctcacagtacagtgtaggaggtgggtaaaaaaatcattttaacatggtaaggtaagtgttaccagggctaggtgtggaggcttatgcctataatcctagcactttgggagggcaaggtgggaggatcaacatagtgagaaactgtctctacataaataaaaaggtaagtgctccagagcagagaaccacgtggggagcagcacggatatcgtgactgtacctggaggggacaggagagggagggacaaaggttctaggtagaggacacatagcatgatctctccaggtaaccccaagaggttcagtgtgctcagagaagagatgggtagactcataaaaacaggaatggaggcagtggccaaaccaagaataagggtagcctccaaggaacctggaatagatcttaaggggagggggattggcagagtcagggaaaggtgctgatggccaagaagtgagggctcaccaacatcagacacgatagatccaatctggctccttcaaaggcagctccatactgcaagttgctgtgttgcacgacgacaaactcctgagcagacaggactagctctgtaggcagggaccatcagatgctggagggactcacccagggcctgcatgaacactggctgactgggatgctaagaaggggagtcaggttctggaccagggctggaccaaatgacctttcaagttccttccaaatctgagcttccaggattctaaagcaagcccggtagctgaactggtgccatgagctgggatctgtggctggggagctaccctgggcagcaaatgggttaaagctcaaataacttttatatatgaattaatgtgtagagttgggagccaaaatctgttccattaatttttccatccattccaggagcagttaggtacacacagtaaagtttattttggtgcatggtatacttcactccattaaaaataaattaatcagcaaattcctgcctggctcagctctggtttatgtaaatagtgcccagctgtaatgagttacaaggtgttattatctcacacacacacaggaggcttcactctagagctccgctcgcaacaaaagcatcttaaataaactgagagaagcggtttgatttgtaatgttttcacagaagtgggatatacctcacccatatagagtttctttatatgactcattttatagcaagttaaatgaaggaagtttgatgggggagggaggggcaatatggttccccaccccctttcttcactttaagaaaatcccccaagagatgacccgcactgagggaggaggggctggtcctcaggtgctcagaccaaggtggctctgcagcacgtgcttcagaagttgggaagggggaccaaagctgggcacaggtctgggtctgctacaactaagccaggaggaatgttctcttctccccagtatctcatgaaaggggaggccaagacaggagacagcatgttcctcattcagttcactgggagtgacaaaggtgactttgttctcaaggcctccttccaaatgacttaggatgtgaaagcccttggtcatcagaggcctcctgggtcccagacgacaggcctggctggctgtatcttggcctgaacagagacacatctccatgaactagaggcaagagcagcagagaccatcccagcctcttccctttctccgtctctaactgagctgcgcggtgccctcattactgcgtccaccatctcaggcaagtttctaagtccctggaataaagaagggccatggcagagagaagtctctgtttcttttaatggccaactcaaccccatggctgaaagccgagggacaacgcgtggtcaccgaccggactcggcagcattacaatctgctcctaggccacagcaggccctggggggtttcccttttgaacctacaccatcccttccttggcctttgggaaaagctatcagtcacatgtagttgctggagggggttggggagtgtgtgctgggggactctcactcggggcttcccctaagggagaggacaccccgggagagctaggggttctcccagccctgtaccccagcagatcagactcctgggcacactaagaggaaactcaacacaaatggggccaggtatttgacagatgctgttcagaggtcagttcaggccactttctgcagggtcctggaccaacaggcacttctctcctggaggttcctcgaagccagctggcgggccgtgcggagggcccagcccatcaaagtccctcgtcgttgtaagtcggagaatggggcttcaggatgctctgaggattcttctccactagagggcgccagctcacctcccctgtcagaagcagatcctccccgttcatggagtccaggtactgtatctgcaaccaggggagggggaaggaggaagcgacagaggcagggcagaggtgaggagccagcgtcaggaaccagcctcccagaggagaggaaggaaggggacggggcatgaggggggcttctgaccatcccaggtcccagaccaagccgtcccaggccaagccgtctctgatctcctagataatttcactaaggtggttcagagaaagcagtcactggggagctgggtggcgggggcagttagggaattccctatcacacctctgaatggagacagacacacacctcccaaggacacgtctcccctacacgccctccctagacagctcctgcaggccaggaagtcagggcttgcagcgcacacagccatgctgtccaccccagcactgctgggtgagagtcctgattctgtcccttcccagtgctgctacccagggtggcagcttcccctctctgagatttaagttcccttgtcttgagagaggggatagaaacaggtacctcacaggacacatgaagagattcaacaatatgcatatatgcagtgctaggcactcacgctttaaacatatgtatgcctctgttgtcctctagtgggcccctggtcagtgggccccagtatcacctctctaggacagtaggggcagacagctctgccattaaaatggtcatcatccagagaagccactgctgcagggccaggagacttcatcttaggctttaggtcattcccccttccaagaatccaccactctggttgcttccgcttccagctgctgacgcttgaactcaaccccagcctctcgcacgtgtcttggctctggattcccacctgccctgccatctcttccctaaagcccactcctcccttacagtgactccatttctgcccccagtgccacccctctgcccacctcctgggttgaaaatctcaacagaacctctggttggctcttgggccatcggccacaccaaacagtctgctcaaggcccagctcctgctcttcctttcccggccttcagcactctgccctccctgtatcacataacaggctggcttactccagggttagccgtgtgcctgggcttcctcaccaaaccatgagctggctcctcgagggcaggactgggtcttattaatcgttgctttcccaagagtacatggagcagcaggtgctcaaaaggtttgctgatagaactgggtccccaccaaagctccctgctttcccaagaaccccttcacggtttttccactgcctctcactggggccacatgggacctcttgtagggacaatggttgtggcagccccttcctagagggccctcggagaagtcccagtgtgtcttgttggggcttctggcacaagcccaccatggcagatggaaatgttgggcaggtctctcagaaaacacagcatttgctttgcgaattgctactcccgtctgagggtgagtccagtcaacagagtatcagaattctctgtgagtggggccctctggccatgccgtgccctctccctggctctagcagatttgaagagtggtcaaacagaagtcctggctcctgggattctctaccctgtgggtctgcagagccccagtatgtggtttttccagcagttaacaagctagtcctatgggccctgtcttctcaagagctgaagtccagccttgcctttcctggttgttgaagaccatgaatacaagtgaacaagagagtaactgtggcgtgacaccccttcagctccaggggccaggccatgaagcaaaggtgtgactcatggcacagcctgagctgtctgaggcagctgaggcctcagtggtcacatgaatcacacagcttggggccctagggcagctgtgcaggctgactcactgggaggccctggaagagcctctatgtcctcttcgctgccagtcagctcactcatctatcaagtatgagtttcccatcaatacaggatctgagggcagggaggtcaaggaattaattccccggggcttgaggacagctatgtgggtaagcagcccccactgcggagctttctcgtagaagctttgatgtcggggagccctggggagccagaggggtgagaaactgaagtggggggactctacttgactgtggagagcatctagcaggaagaggctgtctgtgaaatgctgcctgctgcccagttttgctggaagtcaggagcaggaaacaaatccaagtgggtagagaaggggtccacagtgggcagctgctactacaccacgtgctcatatctgccaggactctgtgggcccagctgctagcatagcactgggcgcacagtaggcaatgaggtgcacagtgaatgaatgactcaaagttcctgagggcaggagactactcgatgcctctttctctctctcttcccatttcccgctccctggcccagttcatggttggacatacagaaggcgctccttcttcagcgtctagtgctgatgtgatctggtcagaattctctcaggctggtccttggtaactccacctctcatgatcccctgaaagcccaagaggaggacccactgttgccaggacttgggaggggagggaaagggtcactcacctgtttcctcacatactctaccagcaattcaagatgtcgagggtcttcacatttccggttgaagaaggttctccagagggcagcggccagcccatgatcatctgaaaggatcccctggaacatacagcacagcagtggtctcctgagggatccacagagccaggacacagacggtggggatactatgaacatgctagcaaccatggaatcagctcagaagggccctccacgcacaagaggaaaatggggcagtcacacagtagaggtggaaggggtcttacaagggtatctggcccaatcccttcattttattacatacagagggagaacagggggtccagaggggccaagccaccagttaggtgatgcagagctgggactcaggcagtactccgtactgcgcctggcccaggcaacacttgagaggctgagaagagaaacagtagcagcaatgctccccctgctgtccatagcagcaatgctccccctgctgtccacagggcacgggctgggaatattgtgaatgtatgtttctcccaggaatggaggtgggcatggactgtgccttcttgcttggtccaaggaccaaggcaaggcaactggtccttgggggaagggagccagctaccttgtcttcactcttacccaactctgggcccagcctctccctaagtaggggaacaggatgttcagcaggattgctggggccacagagggccaggctcagagcttgcatgtgtgtgtgtgcctaacgctgcctcttttggcagaggagacttctgttgggaagcttaaagattacagagcaaaataagagccccagccaccagctaaggacattttctagcttggacctctagaggagggagggctgagagtcttgcttcctggggtgaaggtggctgatggaacaggccctgagaagttgctctgtccaggtgccaaggtagtgtgtggaatcgatgtgctgacttggagttagaagggagatcaagtcctaattccacctctgccaagatcagtgatggtggcagctgactaaaccaaagtctcaatcttctacttcttcaaaacagatgaagttacctgctctacttatagcattcttgaactatttgttaagtgtaatctgttggatacaaagattaggagcatgctttggcagacagcggggatacagtcaaaaccgtggggtctgggagccagagcacagagttcgaatgccagctgtgtcacttgatggccatgcggcctttaagaagctattagccattcctgagcctcagtttttcatgagtcaaacaagcctaataatacctatcccacagagttgctgtgagaattaagagatactggccatgaatggctctgtaagtggtaaacattacccaaagacccaggatcactttattcgacattttattgtggtctgtcctcttgggcattgtggtatgtgaggtctggctccaggcctgctgccaacaagggccatgtccagtatggggtgctgacagtttggtagaaaaacattccacctgttccaaatgctctctgataaaccctccttacggttccacagcttaggactgtcctggcacaatggctgagtcaggaaaactggctttttctggcacatggggacaggagcagaggacaagctcaggcacatcacccttctgcaaacgatttgctagcacaacagcgtgcctgtgtctgctgtgcctgggcacatgccagagcgctgctggcagcaacccacatgtgctgtgcagaaaggaatgggattgggagcgcgtgttatggggacctggagaatgggcagagcccaggatgggaaaacaggcaactttagcagcgggtgagatggctgggaaggggcaaattcataatcaggaattcctgagccatcagaaggaaaaggatgactcaggacccactaatagtgagaacaacccaactgtttcagactgttagggttccctcacacgcctagctcctaatgattatgtttgccaagtagaatagatattatattcccatttgctttgctttgttttgttttgttttgagatgaagtctcactctgtcacccaggctgaagtgcagtggcatgatcttggctcaatgcaacctctgcctcccaagttcaagtgattctcttgcctcagcctcccaagtagctgggactacgggcatgtgccatcacacccggctaattttttgtatttttagtagagacagggtttcaccatgttggccagggtggtctcgaactcctgacctcaagtgatctgcctgcttcggcctcccaagtgctgggattacaggcgtgagccaccgcacctggcctatatccccatttgaaagataagtaaactgaggcttagaggctagctaactgatggctgaactagaaccagcatgcattgatgaggtgggggatgatgactgacccactctagtcagaatacagaacctggcatagagtgggagagcaatcagaatggctgaatacccagcactttgggagtccaagctgggtggatcacttgagcccaggagttcaagaccagcctggacaacatggcgaaactgtttccacaaaaaaatataaaaattagccaggcatggtggcacacaagtgtagtcccagctactcgggaggatgaggtgggatgatcacctgggcctggggaggttgaggatacagtgagctgtgatcacactgctgcactccagcctgggcaacagagtgagaccctgtcttaggaaaaaaaaaaagaatagctgaataaatcaacgaacacaacttcagccttcttcccaccacactgctagtgtaaggcagtgaaaacaaatgagagactaatctgagggtgcacatttcaaactaagaaagcagaactggaagaagggtcctgggaaccaaacatgagggcacagcataatttccccccaatctaatcgggtgcctacttgttttccctcgtgacacaatgaagcatccttcagaaattaagacacctaggtctagagtaactgagaggaagccaaggggattgtttcagctttggagggttctagttctgattaagggtttaaagtggcagagttccactcagtgaagattgatttgacatcactatgtgctcagcatgatgctaggaacacaagagtcacagcaatatggtctgagctctcagggaacttgcaatctagctgaagggacaaaatcagtgcacatctaacagcagcacagagtaaaatcccggagaatgaacacatgccaagctgcacagtgagactcagctacactctacatggctgcctccttgttctacagtcttagcttttatgacaactcctcagagagatcttcctggtccacatcaagtcattccccctgttgttctctctcactgcactctactgtagttagatatttactgcttatctgctacttgtttactatgtctctcaattagaaggtaagctctagtgggaaagagccagaccgtgtttgttttattcaccaatatattcccatgtatcacacatggtagacactcaaaagctacctgttaaatggataatgaatagatggatgggtgtggaaattcacagtaaaaacacaagcgatccagagaggtcagggaaacctttctgaagaagtaggcctttaagaattgggaggatttagcgggtgtggtggctcacgcctgtaatcccagcactttgggaggccgaggtgggtggatcacgaggtcaagagatcgagaccatcctgggcaacgtggtgaaaccctgtctctacgaaaaatacaaaaaaaattagtcaagcatggtggcgcctgcctctagtcccagctactcaggaggctgaggcaggagaatcccttaaacccgggaggtggaggttgcagtaagctgagattgtgccactgcactccagcctggcaacagagtgagactctgtctcaaaaaaaaaaaaaaaaaaaaaaaattgggaagatttggaaagctgcagatttttttttttttttttgagatggagtctcgctctgtcacccaggctggagtgcagtagcgtgatctcagctcactgcaagctccacctcctgggttcatgccattctcctgcctcagcctcccgagtagctgggactacaggcgcccaccaccatgccgggctaatttttttttttttttttttcagtagagacggggtttcaccatgttggtcaggctggtctcgaactcttggcctcgtgatctatccacctcggcctcccaaagtgctgggattacaggcgtgagccactgtgcctggccagctgcagattattctaagcaagagaaaatattcaaaatatttacagagggagtgcctacaaggtacaccaggccctgaaccagaccctaaagctgaccaagactcagctactgccctcaacccctcattgttaggtagagtctcagtcaggcacagcatgtctatagggcagtaaggcaaacggcctaagagagagcacaagaaatataaaggcagatagggcacatagcaatggcaacagttcacagaaggcctggaagttcagggagcaatttggacctaatgtcacagaaaacagggaggttcccaaagcgtccagggagggggaacaatccaagcaagattctaggaaaaggttgctgtagaacagcgctgtccaatagaactttttgtgactatggaactgttctgtatctgcactgtccaagatggtagtcacatatagtaactgagtacctgaggatctgaattttccattttatttaattaatttaaattaaaatagctgcatgtgtttagtatcaaatagctctagcaccttgtgactccaagtgtggtctgcaaaatggctgcacccccatcacgtgcagctgttagcaatgcagaatctcaggccccgccccagacttgctgagtcagaatctgaattgtacctaggtcctctaggtgactcacatgcacattaaaatacaggaaaaacttctagaattgcacattaaaatcacctgggaacttttacaactacagatgtccacctccaccaattaaatcagaatctttgggggacagggcccagacactgatatttctaaaaagtgtcccaggtaattagtatatttccccaaaatttcctgctcttaaaagtcaccttcgggtgacttgttgaaccaccaggcagcactcctactgaattgtaatcttcagagaggtgataaagatttagattttaaaagcaccccaggtgactcctgtggtcaggcacagttgggtaaaatggctctgccagaatggactggatgggggaccggaaacaaacacaattcggtacatttttattaatactgatgaaaggatcgactgagccaatagagccacctgcaataaagaccataaacaaaggctcacagagaggtgtagttcttcactcctaagcctcatccttttctatattgtaaggcttctacaattacaattcgtccacttttataattgatatgtacacttgagcaataattctcaattcccaacccataacccccgaaagctcatgttaagttaatgatgtgtatagtatgcaatgtaaatgctcccttgtaattcaggatatccagtagaataggaatcaggagaccctattttaacaaaagttaagaaactgaactccagtttcttaacttttgtccttttatgcatttctcactctttgactaccacatgccaagcactatgccaggccacagaaatgcaaacacagtaggcattgcactacccaaaaagaaatccccacccagccaaggtgacagataatgtgaatgtagtaagcactgtgagagtgcagggaggatggaatgagctgagtcacaggaagttcaggaaccgcttcccaggaggggtcatgcttgcattaaatctggaggtaaccacaaaatcagtataaaagcatatggttagtttaaaatatcaggtgttcattacaccattctttctacatgcttgaaatctccacaataaatgttggggagaaaaaagatgagatagatgaacctcgagggcattatgttaagtgaaataagtcagtcacaaaaggtcaaaaattgtgtgattctacttatatgaattatctacagtagtcaaattcatagagacataaagtcaaatgaatggtggttgctaggggatatgagggaaggagggaataattattgttcaatagggacagagtttcagtttggaagatggaaaagctctggagatgaatggtggtgacggtgcaaagcaatgggaatgtactttatgctactaaactgtacacttaaaaatagttaaaatggtacattttatgatatgtatattttacaatttttttaaaaagatgaggccaggcgtggtggctcacgcctgtaatcccagcactttgggaggccgaggcgggcagatcacaaggtcaggagatcgagaccatcctggctaacacggtgaaaccctgtctctactaaaaatacaaaaaattagccgggtgtggtggcaggcgcctgtagtcccagctactcaggaggctgaggcagaagaatggcgtgaacctgggaggtggagcttgtggtaagtagagatcgcgccactgcactccagcctgggtgacagagcaagactctgtctaaaaaaaaaaaaaaaaaaaaaaaaagatgagatagatccaaatgtcctgatgtggaaggacacccaagatacatacttcagtgaaaaaagcaagttgcagaatcatgtgtctagtgtaactccagttgcataaagaaggaaaagacaaaggtgcttgtctatgcacagacaacattcggaaggacatccaataaactagaaattaagttttcgtctggagcagggtaggaaataggtcttctaatttcattttttttgagaccaagtctcattctgttgcccaggctggagtgcagtggcgcaatctcagctcactgcagtctccgcctcccaggttcaagagactccgcctctcatgcctcaccttcccaagcaggtgggattacaggcacatgccaccatgcctggctaatttttgtatctgtagtagagacggggtttcaggctgatctcaaactcctgacctcagctgatccacccacctcggcctcccaaggtgctgggattacaggcgtgagccactatgcctggccaggtcttctgatttctatttcaaccacttatgtacagctttacaaacttttatttttatttatttatctttttttgagacggagtctcactctgtcacccaggctagagtgcagaggcatgatctcggctcactgcaacctccgtctcccaggttcaagcgattcacctgcctcagcctctagagtagctgggattacaggcacccaccaccatacccggctaagttttgcatttttagtgacacggggtttcaccatgttggccaggctggtctcgaactcctgacctcaagtgatctgcccacctcagcctcccaaagtgctgggagccactgcgcccagccagttttacaaactttcaaaatgaatatgtattgctttcataattaaagcaaaaaaaaaaaaaagtgtatactttgcctggcagaccatgctgtttacgtgaatatcctcctctctctgggagcacatggggctaagacagtgtctcatttgcctctgtccctccatccagcacccagcagccactcaacaaatgctgactagttgaatggtttgaccatattatatactgctttctttcccaaacatgtggcatgtttcccaaacatgctcagcacattcattctcgctgcccagttgatgaatatgaagaaataaatactacgccatggtggtagccagtaacaatggtccctgtggcttccctcagaggctctcatcaaaagcctttgctgggggaggccaccgtcctgcctaagccttggcaaacaatcttacctcatcatatcccaagatcgctgcatagaaatgatttgtcatgaggatcatgttcttcttcaggatatagggattaacctacagaaacaaatggcaaaaacaaaagtttgaaagaaagaaagaaaaaaacccaaaaagtatgatctttgactcttagctgtcacagactcttagtagaagagagacggccactaacaagtcaagctgccagtccattctcaattccctgatgtgtcaggattctccccaatttgccaaattcttttaggttttgatctcaaattacacaagtcagcttaatgaactgagccccaaccacatgtttagttttgtgctagatcctatgaaccaagtataagaaacagtttcttgattggaggagcacagtccaatgtaggaaaataggcatataaaaaataattatactgcaacatgttgcctcaaatcctattctaaacatgctgagtgataaatgggttttagttttacctgcttgagggagctggtaagggctctctaggaggtaacatttaagtgaaacttggaggaggaggagtttgacagaggagagtgagggggaggagggagagagagcattctagacagagcaaggtgtgcaaaggtgcagaggctggaaagaaaatggcgcagggagggtgtcagggagggtgaataggcaggatcacaagaaagttatgttgagactaggttaggagacatcttaagggccactcaaaagagtttgtcgtgatgaaaaaacagagaaggaagtggtcagaggtgggaagaggagggagagaggcaggactctgagagacatgctgaggaaaaaggggggcctctgaggccatggaaaggagggaagaacaaagcaggggcagctctgaagcaagaagaatgttaaagttaagagatcattttggctgggcagtggttcatgcctgtaatcccagcactttgggaggccaaggcaggcagatcgcttgagcccaggagtttgagaccagcctgggcaacatggcgaaaccccatccctacaaaaaaatacaaaaattagcctggcatagtggtgcatgactgtagtcccggctacttgggaggctgaggtgcatcacttgagcctgggaggccgaggctgcagtgagccaggatcgcgccactgcactccagcctgggcaacagaacaagagcctgtctcaaacaaacaaaaactcagagactgttttagaaatgcaattctggtgagatggttgagagcccagtagaactcctctctcctcttggggaacagcctggcctggaggatcttcagggcccagagtgcagttcgctgaatgccttcaatagggtacaactctgacctccagacagtaacacgctgtaaggcagggtccacgttttattcctcttcaggatcccagcagaaagccagtgcaatgtatagcacagagtaaggactctgactatctgaactgatggttttggaaatagccaaaaggcatttggaactttatgtggagaacaagatttgtgcttaacaactctgacggtgaccatgcccacagtcatctcatttacgaagcacctgtcatgggctgggaggtagatgtgttacagtcactcagactgtaagtgactgtgtgagagactcagactggtgaagtgatgccttgtgtcacacagcaaattcatgataaagctgagatcagcatccaggtcagtctgaatccagagtccacactccttacagtctgccagggttctgcttctgggaggataattttactttgggtcacaaatcaaagactgagtgattttatcctgtggctcataactagtctcggaagaaatgtagaaagggtgatctggatttagactcagaaaacctgggttcaagtgatagttttgctatgtacacaggatgttatcttaagcaagtcaacctgagtccatttcctttttcttttttgagacagagtctcgctctgtcacccaggctggagagcagtggtgtgatcttggctcacggcaacctccgcctcccgggttcacagcattctcctgcctcagcctcccaagtagctgggactacaggtgcccgccaccatgcccagctaattttttctatttttagtacagacggggtttcaccgtgttagccaggatggtctcgatctcctgacctcgtgatccacccgcctcggcctcctaaagtgctgggattacaggcatgagccaccacgcccggcccatttcctttttttttgagacagagtctcgctctcttggccaggctgtagtgcagcggcatgatctcagctcactgcaatctccgcctcccgggttcaggcgattctcctgcctcagcctcccgagcagctgggattacaggcacctgccaccacacctggctaatttttttgtatttttagtagagatggggtttcaccatgttggccaggctggtctcgaactcctgacctcaggcgatcagcccgcctcgacctcctaaagtgctgggattacaggcgtgagccactgcgcccggcccctttcctacacacagggctatttggaagagcacgtgagttagcatgcattcattcattaatttaataatgtatgtatgctgaaagccttggtaaactgcagaatgctctgcaaatgtaaggaattataagtaataacttctggtttgtttacataaaaccaaaaccagttccaatgctttacagccatggataattttcaaaaatgaaaggattgtgaagctcaaggctggaaaatgtagactggatgtaactaggagtgcaaaccatgacctatcccacacaccttcaaccagggctacattagccatccatccttggtgttctcacagctctctgggcatattttctgcctgggtacacacgtggtttagagctgcttatgcacctgtctctcccattagtctgggagctactcaagggtcataggaaccatgtctgattaatctcggcacccccatcatctggtccagagcctaacccagagcaggggctaagacaggcttgctggtaactgaatttttacaagggcctgtgtactacgccatgcatagcatgttctatccaactagtgttttaggggattttcttcttcttcgcctttctttccccctgttgaataccttctgtgtttctggaatttcagaaacatatactgccaaacttctactgtcccatcttccagaaaggggtaaagggaagagtcaagaaacaggccagagctagagttcattccttctgtcatgtgaggatgagactacaactcagacctcctgatacccatacttggaggatctccctactcccacatgagttgttctcctaattgtgttaggaataatcacagccacaaacggatgatatcagaggtgtcaaacagtaaggcaggagcatctctcagaggaaaacattcactgaacctgcctagcagagctagtttatgtcatgtatcacaccattaagctttggagcaggaagggccctcagagattacctagctcaatacccttgaggaaagggtgaactgaaacccagaaagaagagacttattcaagatcacacatcaagttagtataagagccaggattagaacctgatttctgggtaagtgcttttcctactttaccatctgcagggcatttccagagatcatcaacacattcatctgcaaacctcagttcttgctttccagcaaggcccacaaacatacaaacacattttctcctcttgggatacacctgcattctggttggctactgcccaggaaaaacggagtgcaagagtagagttccttactagcaaggctccttgacttcctggtcctatattctaactccagtgacctgtaagctgcctctcccttcacctctagctgagacaatggcaaactgccacagctagaaatgcttttcagatatcatcacccaggctggattagatcatgaaaaggggccttcctggaagagggtggaagtgagatcagtacagacacgtgatctgcaggcaacaggtgagggcaagtgacagcaccttcctcaactaccggactcactcggcagggcccttctagctagtccagcagccaaggggagcaggatattcgctctggtgaatccctgttggattttattccctcatttaagtttttggttgctggtgtgcaggttccccacctctccactgccagatcattctatatggagcactctgcccatgactacacagctgcacccagcagaagagaaactcctcccagatagtgttgggccgttctcttattaaactcatcctttccataatgctttgcttttcataaaaacccatacatacaacaccacaaggaaaaggttccttttatatcagttactcatattttcccatttatttaagccattaaaattcatgcagatattttataagccaccaggattcagtgactggtattactgaatgtttaataataaactaaacagaagaaatcagagggttaaatgatgactgcaattcctgtaatgacttaattaaatttttattgagtacataaactatgatgtcacctctagccaaccacaggcctgctttcccagcatgtcacagggagggagcactcaataggaggcttggctaaatgagcagcaggtctcagctgaaatggggaggggagtgaggctcatgtaacacactcaataaattatccgttcatttttaaacaaagtccatgagttataatatatttgccatgcactttttatgacataataaaaatgttaccttaaggattacttaacacatactacaaatattatagcagaggcaggcacaaggggcaaagaaaacaaacacgagcaggccagggacgggtcctggagtttatgtcccaggggaaacagcatagtatattaaaaagggaatgcaaaaaaaaggaagggatgcaagagttcagggttactaatcggcagattaatgaatgagacaaccaacagagaacacaagtaaggcaataatgaatcttgcagggcacatgtttaattaaagtagcattctcaaggaggaatattagctttaaagagatgccagttcatttgaggccaattcgctgctctctttccccttttcactgttgctgccttaaagatatttatgtgactgcttaacagaggaaccagactatgtggatacagggactgatgggagatcaagttttaactcctccatggactctacaaggcttctagtgatctgctcttggccatcttttttgcctcccctcctcttgcctccccatcttacttcaccctgcagtcagtaaagtatgtgcacagatacatcatgctgtcatctatttcttagtcatactgctgccaggaattcttctcttctttatccactgatggaagggatgctaactccttatcctctaagacttagcacacatattttctctactaagtctgccctctcccccatctacaggtgccccaaagtgattcaagtctggagacgggtcccatcattcattatttaccaagtgccaataactgtgctacaactttacacattagcccacttaaaccttcccaaggactctaagagacaggaactgttactgtctccactttagagaagaggaatctgatgtttgggaaagttaaagctagacagctaggaaatagtggggtcaagataagaatacagagcaatccaactccattgcctacctgtgttggaatagacactggaaggaatgtagctgccccttcctgtgccccacagctcaggctatctgcagaggcagaactaagaaatgctaatgtggtcttgagtaaacacaactcagagattccagttccagtggcagctagagacagccaccagatgggtcatcagtggccggttactaatacatcagatatccctagtagagccaagctccactcctgggaaaacctgaggttgagagtgggtgtaattatggtgggggaatgggaaaacagaagaaagttggtatggaaaacactgatgagcatgaaggtgagaataagctttaaggttactggcttgaagcaaagttgctaacagtagcagactaagaatttgctggaatgaatgaatgacaaaggacagctagagttgctggctgaagcctaaggactatatcaaattcatcataaggcaacaatgcaacacaagattgtaggtcatgttttagtttgctgtagtagacagtaatgccaccaccaatgctttgcagtgccaacgccatgttctacagtcattgtgcggcaacaggctgatgtgcactgaacatcagctagcctatttaaagttcaggttagaaattagcccactgtggaatattttgtgagatacttagaaacagagtaagagtagacagacaagagagacgggggacatggagagaccaaataaaaaagtctacctgttaactcacatgcattacgactgaaagatctattgagggtcttttagcaatgatgacaaaatacaaacaaaactgtgtgtgtgtgtgtgtgtgtgtgtgtgtgtgcgcgcgcgcgcgcgcacgctcaggcacgcatgcatattgagcagttccagaaaaagttgttaataccaagaataaaaagaaaaatattttaaatgaaagacaatttctttttctctttttagaaaataatgtgaacatttaaatagagtatgttcccgttgcgatgaaaggccaacctaaacccagcatgaggaggtccattttaaaatccattttaaacatttcaaacttttaatgtacaagggaagcttgctatgatgacatgctgtttaaaaatattcccttattggctgggcaaggtggcttacgtgtataatccccatgctttgtgaggccaaggcaggtggatcacttgaggccaggagttcaagactagcctggacaaaaaagtgaggtcctgtctctacaacatagtaataataatacaaacccctttcttatttattttgaaaattctagttttgctgcttgggatctacatgttcaagactgcatagcctgataatgtgctgaaaaacaagggacatggttggcagacagaattgcagaaccagcagccctaatttctatatagtcacgaagtacaggagtccttccctcaggcttggaaaatagccaagagagaagagatgtatgtcctcagaaattctagtcatttgtccagttgagaaaacatgagaacacataatattaagtccacaatcatcttcaaaaggagctgatgaggtacactacggttctgggatgatcaaactaccatggcaatttaactttcgtctcttttagggcatttgaataaggggaacattatagctataatctactttggtttctggaagctttttgtagtattccacatgacaagtctcatgcatactcattagagaagccaacacctggcttgaaagagtcgcagtttcaacaacagcactgatggtgcggagtcctaaaggaaataatcctgggtactatctaaaatccgtactgataataatgatgacagtgatggtcgtaacaatgattacacaatgcatttaataatattttcattttattatcttatttgtgcctcacaaccacaaccctgccctcgaggagctcacagccaaaatgctattgttgtcctgattctataaacaaggaaacagaagctcaaaactgttaagtggccaggtgcggtggctcacgcctgtaatctcagcactctgggaggctgaggtgggccgataacctgaggtcgggagttcgagaccagcctggccaacatagtgaaaccccatgtctactaaaatacaaaaaattagctgggcatagtggcgcatacctgtagtcccagctactcaggaggctgaggcgggggaaccattgaacccgagaggcagaagttgcagtgagccaagattgtgccactgcactccagcctggcaactgagcaagactctgtctcaaaaaacaaaaacaaaaacaaaaacaaaaacgttaagtcacttgtagtcaaatcacatcctgcttgtaagtgacagtgctgggacttttaactcagatggtcagtctctaaatctactgtcttttcttttttttgagacggagtcttgctctgtcacccaggctggagtgcagtgggaccatctcggctcactgcaagctccgcctcccgggttcacgccattctcctgcctcagcctcctgagtagctgggactacaggcgcctaccaccatgcccggctaattttttgtatttttagtagagacggggtttcaccgtgttagccagcatggtcttgacctcctgaccttgtgatccgcctgcctcagcctcccaaagtgctgggattgcaggcgtgagccaccgcgcccggccccaatctactgtcttttctaagcgatcacacctttctgcttctgatgagtcatatgagaaatggaagaatcacacaagcacaaagctaaaattgctcatttctgcactttggaaagcaagagtaaaatagactctttttaaatttagaaaaactgtccttaaaaagaagatgagattcgacaaggtcaaatgcacagtattatgtctatatcaaaataaaaaaataacaggatgaagcaagggtctgaccaagtagatgtaatagcatcccagagcaaatctttctcatgaacagataaatcagaaatatgaaaaggtaattattattatctatattaaaggaaaagccatatgcaaaggtcaaaaagttttctcccctcatttattttaatagtcaaaagtctttgtcttaccaaccgtacttaagaatgaacatggagaaaccagagaggtttcaagaaagaatgtcagatatatatggttacaatgggttggcactggtcacaggccagggcgttcaagattctatggccaagagaaacacccagaggctattccatggattggtcaggttgcctccatcatctgcctcaatgggtcagtagatcttagaagtactgtgacactgaggtttctctctctgcatttcttccttatgttcaggacctactctttcccatttccacgagttggcaggctgttgatcctagaatgctgtcctctcatcacagagatgggcacatagctgaagcttagctaatctgactcttgcttctgagagtacaaacaaccaaatataaaaggaagctacagttggatcacccttggcagggcacagtggctcatgcctgtaatcctagcactttggaaggccatggcaggagaactgcttgaggccaagaattaaagaccaacctggccaacacagcaagacctcatttctaaaaaataaataaataaaatagtaaagttgggtcaccccaaagagactatacataagttcctattgctaagatcccttagctgccctgtatctttccttcctgagctctgttgttaaactctccattccatgagccttagttaccttccaataaatcctttgtttgcttaaattagctaaagtcagcctcccaagtagctgggattacaggcacgcaccaccacacccagctaatttttttttctttttctttttgagacgcagtcttgcactcttgcccaggctggagtgccgtggcgccatctctgctcactgcaagctctgcctcccaggttcacgccattctcctgcctcagcctccagagtagctgggactacaggtgcccaccaccacgcccagctaatttgttgtatttttagtagagacggggtttcaccgtgttagccaggatggtctcgatctcctgaccttgtgatctgcccgccttggcctcccaaagtgctgggattacaggcgtgagccaccgcacctggccgagcaagataattccatttacacccactaggatggctataatttaaaaagaaaagaaaaataagtattggcaaggatgtagaaaaactgaaaccctcatgcattgttgaagaaaatgtaaaatggtacagccactgtggaaaacagtttggcggtttctcaaaaggctgaacatagaactaccatatagcccagcaatcccattcctaactatatgtccaaaagaattgaaagcgggaattggaactgatatatttgtacaccaattttcatagtagtatcatttatgatagccaaaaggtggaaacaacccaagtgtccaatgacagggataaacaaaatgtggtacacacataccaagggatattattcagccataaaaaggcataaaattttgatatatgctataacatggatggaccttaaaaatgcactcataaatgcattatgcttaatgaaataagtcagacatggaaggacaaatattgtataatttgatttatatgaggtacttaggtaccttcagagacagaaagaagaatagtctacctggggctgatgggaggaagaaagggaaaattattatttaatgggcacagagtttttgttggggataatgaaaatgttttgggtatagataatgaaaattgttacacaacactgtgaatgtacttaatgccactgaattgagcatttatgaatggttaaaatgataaatattatgtatgtatattttaccacaataaaggaaatcccagttacaaacagttcttctcagacaggcatttcaatctgtgacttaaccatgtgtgtattaaagcctctcttaggacacttatccatttggcacagtggtatcatgagctaactgatgttcctcaccagactataaacggtcttggtacagaattctacgttgcattgtacatgtttgataagcacgtattgagtaactgctgtattctactgtggtatatgctggaggtaaaaaaatcaataaaacacagtacttgtcctcaagaagtttacaatctcacgtgggagacacacctagcacgttgtatgtacaaaacggtaatggtatagggactgaaaggcttgagagaagaggcaacatttattacagtgggtattaaagggtcaacaggtatgttcagacagaaagaatggtatgtgtaaaggcacagggaggtgaacaagtacagcattttcaaagggaagtttgtaaaaaaaaaaacaaaaaaacacacacaaaaaaaacaaaaaaacacagaagctgctcatggtggcaagaatcagaaggtggagctggaagggcagtttgtgtgagattgtaaatggccctgaacgccagccacatgaaagaaagaacaaggaaggggtttaagcacagggaaattgcatggacagatttattttcaaaaagtaaccctagaagtacagatcacaaagttgggggaaggtccagaggcaggaaaaccagaggaggctgctacaatggtgtagatgagagtctgtaaggaactgaaacaatgtgaagtgacaacacgaacaaagaggaaggcatgctttcaagagaaatgactacagccagagcaacgggatttgattatcgagtagatgaggaggaggaaaggggaggccatgacttgcatgtaatcagacctcactgaagaaagtggagagaacagaaagatgaaaacggaatgcaagttatatgcaatcatacactgatgactttctgaccctggcagtgccaagcgcagacaaccagtcttgtatgattttagcaatcaccatgcccttcatgtctcctatgttgtggtaatggaaaatcttacttggataagatgtaatatgagcaagatgtgtatttagtttgagcccggcaggcgtctccagtggagcacaggcataacacaccagggcctaggagcctgagccccttttccagtaatttgttcactacatgtaggtcggtatcattactccgggccctctgcattctgactgcagccatgaggtctgattaccgtcagcaagaagacgctgacacactcaggtttccagagacacttggaggctgctaattgcaccctgagcctcatgactgcatttatgagcgcagaaaagctgcaggcactacttggcttttttaattattttctattaaatttaggcagactgggtacagtggaaaactacaggatgcttgttccacatcactaccaaccatgtcaactgcacagacacaaaaggcaaacaggtgaatatagatcaacaagttggtcagttctttgctaatagagctgagccactgtcacttgtcatggatgctgaggccctgaacaacctagaggatctaaaggcaacactgagatcactgacccgagtcctttcccagcgatcctaaaatagatatcatattgcccagatggcaacattttctcagaggacccaaaatttagccccttactgatcttgaggttcctgacccttcatccaacagccctgccttcttcttctccacagcaatgaagagtgaaaggggcggggtcaccctaatgaactgaatcacaggagttaactgctaactccacctgggcacaatgggtcagaccaaagtctaaagctcaaaacagtaaagcagacatttacattgtttcacacaggtcacagaatgtttgtctttcactgctgtgtcctaactgctcactgttcagagctgtacaattgccaaaatactgacccaatggttatctgagaaagaggctgttccctgctgaagacatgaggaagcaaaggctcagaaaggtcaagtgactcacccaattatcacttggctaataaatggtcaagaggttcacagagacaaggtcttctggctcctagtccaagtttttttgtttgttttaaggctcaaacagaattgccactcagtggatagtttgtacattcctgtagaagcatcctgggaatggctgagcctggatcccaggtagaagccatatgatcattcttacttaagtagtgaggtggtcaaggttgaggccaagagtgaggttcagatatcccttaaaatggaattgacagagccgggtgcagtggctcatgcctctgtaatcccaccactttgggaggttaaggcaggcagatcacctgaggtcaggagtttgagaccagcctggccaacatggtgaaaccccttctttactaaaaatacaaaaattagctgggcatggtggtgggtgcctgtagtcccagctactagggaggctgaggcaggagaattgcttgaaccaggaggcaaagattgcagtgaggtgagattacgccactgcaatccagccggggcaacagaacaagactttgtctcacaaaaaaaggaaaaaaaaaaaaaaaagcatggaactgacacagcctgtgagttctgagagtgactccatctttatagggtaattctcttttgtcctcttttctcagtaaaatgttcttagaaaggtattttatccaaaggaaagagacaaactcagttagaatgctgtatgttaaagagatgatctctttggtgttctgtatttaagtcccaactcagacctaggaaacgcactgaaatctaagtaaattttgggccccaacagccctgtttccccacctggtgagtctgaaagattaatcactctgagcctcagtttttccatcacaactatgcaaaaccacctttcctttttccttttcatattaacagatgaaaatgcctaacagtaagtaaattagtagtggcaaacatctatttcactctcaggcattgtttaaagaacctcacatgtgataactcatttatccctcacaatgctacaagcgatgtaaggtgggtattacagttatgtctattttacggagagaaaactgaggcatagaaaggaaacaggcatagagaccttgcccaaggtcacatggctagggcaggatttgagtccaaactggcttcagtatgtgagcactctcaactactctgtgatactgcattggaaaggaggttataaactcaacccaatcccccacttggagatgagagcctggaagtctctgaagcttctctcaggaccttggggctcacctactctcctgcctcatcctcccattacactcagccctgccctgggataactcctggaagaagcctgcagtgaacacaaaacaaaaaagcaagtgaactcatatctttctcgttcgtctgtttcgtgtggaagtgaatccaggaaagattcaacttcctttctcagcataaactagattgtaagccctgtaagatcacttatctctggtatattatctaccaaccacattcagggattagcatgtggcgagagacaaaaatgttccttgaataaatgaatgaaacaattcttaataaaaccatacaaattaataatgctactggatctagaggaaatacattcaatattgccttcatcaaatgtattcagcactacccaggcatcaagcactgttttaggagctgaggctacagcagtaaacaagagacaattcccgaactccgggagtttaggatgattagtcaggctgctgaatgatttgcagaatgaatctgagatgaagagagtcaagaggcaggaggaccagtgaagaagcagccgacagtgagtttaggtgagaggtcaggactggatctgagcatcagtaggacagttgaggccctgatagtggttgttttaaagaagggctccttatagttcctcctgctcctttgagaaccaggcacgtcacattgatggcaaggatcactgacattcagaaagaccagctaaagagaggacaatgaacatggaaaaacaagtccctccactctagctgggccccttcagctccaaccaaccccacagggccattcactcagcattttgggggaaacaaagtgagaaaagagtgttacagctgcctcatcaatggatccagaaatactcatggcacacccagggcagctgaaagaaacatctgtctctactgtatcctaggtctgacctcagagcctccagaacttttttacatagccccacccagatcctggcggagctactgccctctggtggtacccaatgcaggggttaagcccacaggagaaaagagtcttgtggtaggacatggagtgagaggcatagtcaaccccaagagctcgtcacagtgcctgtatgtcttactactgcaaccactgctttttccaaagacgctatttacagaaaactctggttaaaatgcaagagttatctgggaccattaaaacagatcctgttggcaacccttaacgatttggcatgaatttaatcaggtaaactgcagtgtaagtatagaattgattctaagaagatagggttaggaatagactctgtgagttcactcactcattcaccattcaaccaatattggatggaggcttaccatgtgctaagcactgtgctagacactggaatgctgaccttaagagaaaaggatcaggaggtctttgattggaggcttttcccagcaacacaaaatgcagggtgtgtgtagtggctctagagaacagcaaagatgatagtatcaagtaacgaaaagagcaacagaatcaatcaagagaagtgagttttagtctctgctactaccgctactatatgacactgaccaagcctttttcctgaccaggactgagtgtcctcacttggaaagggttgaattaggatcatctttgtggctgtcaagcttctaggagcttggcggccactgaaatgattaggagatggcataaaataaaaacactgactgcttggcaattctgaccagctagggctagccctgggtggggcttcctgccatcagccagggcaatctaaaattcctttacatagttcctgaggatcatcaccaagtgagattcttctgacatccatacccaaccacttcatcagacgagatacccctagtacgttatgaaccccacatttgtccccaactaccctagtctcttctggtccctttgaactgaggctattagggacggagccagttcttccagtgctacagggcaagagaggcttggagaaaagtagaaagttttgcaaactgtgttcactcttggaaattctaccctgggctggaaaatttttatctcatggattttttttcaagcaggaaaggcccttagaaataacctggtccaggctctgcattggagcctgctggttaattgtggaactaagtctaactccactcttgtagctccaagattggtgagtgtttttcagttctcccactgtccttctagagggaggctcttctctggcagccaactcaccttgggacctaaagcacaggagacgataaacaccttctgtctttgaaggagaaggagtatagccacaaacacctatcgaaaatgccaaagacaacaaggttcatttgaaatctgaagaatcttagcaaaacggtatgggacagggatgaaaagaagagcaggagacagaagcctgctcagcgcttaacaggaatcatctcctacttgccccataaccatacacataccacaagccagctgattcctaaccccagcagctaaactgcccaaggcctaggaaagggggcaacacacacagtttacaccttttattattctgatcaaaatttctctcctgggagcagaaaggggtcaaaagtccaacaccaaaaatatatatctttataagtcatgggcaaagaagtattacagcagacagttatttaaaaaaaaaaaaaaaagctacggtgaacagagcagagtaggaggtgtgagaaaactcactccaagtaatttattcactgggaaccacaaagggctttcccaagaacagcaaaaacaccattaatttctccagtaccctcctttcaaagggctccaaacacttcacacatatcgttttaaattgtcctcaaaggctccaaaataaggggttactatttccccaggcacagatggagaaactaaagcatttatgcccaccctgctctgcccaagtcatcctaaaagattcagccaacatcaactgagtgcctgctatgtgccttactcatgccaggcagaacaggagacggatgaaagataggatctttgtcctccagaaagccagaatccagtgtggtgtcacagatgcacctataaatcccttcaagatatgacagcttatgctaggtgctattgaaaatgtccaaatacagcatcctgatagctcccatttatcaagtacttaatatgtgccaaacactgtgctaagccatattgtttaagtcacataactgtgcgtgacttaccttatagaggatggaatggagacaatgagaggtaaagagacttgcctaggatctcaaagcaacattgtggcagagcagagattagaacctatgtctgtctggctccaaagaccacatgacaggaaaagaactgtttggaaaactgggcaccggcctctcaactttctagcactgaatgccacactttagaggcgaacagcagaacacacaggggccctcactagattttgggggaatggcctgtttcctgggcccagaattgtatgtgcatgtactaactgggattctccatcatggggacatctgaagccaaaggtaggtgtgtcttccaaaagggaacagagctctctctgggtaaaggagagctgaaaggtcctgagctcttcttgctcctttggtaagtactgaaaatggaacaggactagaaggtatgggattcccatgctggctttaacagaaggttcacagcctgcaggaaggcatggtggctgcagtgcacatgcagtacggtatccttttctcagagccagagtagaactcttgctggggaaggagtcctctgctggagaagggcctggcttagtgacagctctgcagagctcacctggtggcagcaagtgctgcctcttttgccaaagccccattttggaggccaaggaagaaaatgccagacttggagaaagaagagctccccacaccagacaggttacaaagaaaatggtcagtcctggggaatgcctaggtcttagcaagggctgggctaataaatcgctctattttaagcccacaggacataagacagatgcgagaaagagaatgtcctccaaactctgagagcaaagttgagcctggaaataggaaacctaatccccagcctagcattcttcccacttacctcaaggcatccttctgtaatcgtttcatatcttaatttcaacctaataaaacaacaacaagaacaaaaaccctttgatggagccaggtacttctgtgtattattatctcatttaacataagtgacttgtgcttctatcaatggatcagttagtccattagttcactcataattacttatattctacctatttccaaaaaaaaaaggttcaaattggattacaacaaaaggcacatgttatggccaaaagagccaatttttttttttgagcaaagattttgaaatccgtcagctctgggcttgtgacttactatggcggccacagccaagtcctttaagttttctgctccttggttctcctcagttgtaatatggggacactcccaactctatcacaaggtaatttgtaaggattaaatgagatgatgtctgtaaaattcctggcacagagtttggcccatagtatgcaccgcaaccaaaataaaagtaaaagaaaagacttaagtaataaagtctgtggggggcgggagaagaaaggggataatgaatacttacatcaaaatatctaaataagggaagcgctgtactttttggcagttgtggcaaaaggaaagcgggactgctataccattctcattgtttaataaagagaagcatggaaattcatcaggacaaagaaagttcttaattctcaatgcagaagggcacataaatacacgagtgactgtgtatgttacacacatacacatgcttataccatctctctctccaacaggaacagggcaaacggctctccagagtcctgctgccccctgacaccaaactactgcggtgtacagagaagtacttcaagagttaaaacatttttgtgccaatattttaagagtgcagaaggttccaaattacatgtaaaataaacaatgccagactgtgaaaactcttggctgcaacgttctctgatgttaacaagagtttctttattactgtaacctttcagaagtgaataaaaattatttctctgccctagttttgccctccagtaaaagtgaagagagcagtgaccatggaaagagctgtacaatgacctctcctgaaggccgggggctgggaagggggcagtttagaacacaaagccttccatatatgcttctaggttaaaggctagaaatttagtttgtgctgtgctgatcatattgtaaaattttacattcctaatacttttatgtaaccaaaacccttagagcgacaagaaggcattttcaagagcccaacctgagctggtgctatggagaaaacccaaatctggaccatgacccctcaactactcagtgaacccccttactcagaaaccgagtctgaagtgtccttaacaaagaaggaagaagtactgtgtgtgaccagtacttaagacaaaacatgttactactcagatccttaagtgtggatgagtctgtaaatatcagacacacacaaggatctcaaaatggagctagtctggataaagagaatctgcatttaccattgcaggagaagtaagaatgtcaccaaacaaagccaaacattgtttgtcttctcataccaactcggtgcctttatccacactgttcctctgcctggcattctcttcttgtctagcaaacacctacttatctgaaaagatttaactcaaatgtcatctattcccagcctgtctcgagactctgggcattctcagcaatttaaaaacattataatttcttaatattgtaattatctgtttatgtttatcttctcctactagactagggagtcatggaaaatgtcttaatcatccttgtatctccagtgcttttagcacagtacctggaagctaacaggccacaataaaatggatggatagatgggtaaaactttgtttgtgtctgggaacagaaatcagacagagagtgatgaactgctaaaaaaacagaacacaagctctgggacttaacacaaggctagcttttcagacttccacagagttgcagaatgttaagtctggaagagaatgtagaaatcatctaactctcctccccagagaggtgatgtgatttgacttactcaggcttacccgaagagtggccaggccaggcagaactcgttccattatgccacactgtcccttcttactactgtctaaaattgtcggtaaaataagtaatgattaaggtcacatatctaatttcattataaacatatctaatttcattataactaatttcattataactaacacatatctaatttcattataaacaaatgaacaatggaaatcatctaggaattcaaacaacttgataaaagacacaatatctgaattcttcaaaaagtttacatagtgtcaccatatgacccagcagttccactcctaggtatacccctcaagaaagctgaaaacttatgttcagacataaacttatatatgaatgttcacagaagcattattcacaaaagctaaaaagtggaaagtggaaagactaaatgtctattaactgattaatagatttttaaaacatggtatatctacacaacagactatcccaaaaaggaatgatgtcggtcgggggagttgagcaaaaaataaataaataaaaagaagaaaaaagacaaaagaaggaatgaagtactgaaaatatgccacaacatgactgaactttgaaaacattctgctaagtgaaagaagccaaacataaaatactgcatattatatgatcctatttatatgaaatgtcccaaataggtcaatccatagaaacagaatgtagaatagtggtttccaggggctaggggtaaggggaacgggtgtgactgctaatgggcacaggatttctatctgaggtaattaaaatattctggaatagtggtgatgggtacataatgctgcaaatttactaaaaagcaaatttacatgttatgggatataaattatatctctatttttaaaaacagaaaaatggaatatctgccctctagaagctaactaactggagaagctaggaccaacatataagatgcctggctaggcgtggtggcttatgcccagcactttgggatgccaaggtgggaggatcacttgagcacagaagtccaagatcagtgtgggcagcacggagagaacccatctctacaaaaaaacccacaaaaacaaaaacctaagatgcttatggactgaaaggttcaatgctacaatacaagtggatactgtggaagttagaggaagaaagaaacaacacttgggttaaaaatcttaatgccaatgctagagccatagtttttagtttcgtacagagtagtaattaaaagcacaggctctagagtccagaaggtttgggttccaatccaggctcccatatttactgtgtaagtctaattaaattgcctaacagtggtaggtaggctgaatttggtctcctaaaagatatccatgtcccagttcctggaacctgtgcgtgttaccttatatggcaaaaaaggattttgcagctgtgatcaaattaagacacttgagatggggagggaatcctggattacccagttgagccctaaatgccatcacacatatccttccttttaagagagaggcggaaggaacttaggctcagatagaagaaaaggcaacatgactacagaggcagaaattgcagtgatgcagccacaagtcaaggaacatcagcagccaccaagagctggaaggggcaagagtctcccctagaacctccagaagaagcacagccctgccgacaccttaatttcagccccatgaaactgatttctggcctccggtactgtaagagaataaatttttgttgttttaaaccaccaagtttgtggtaatctgctgtaactgctatgggaaactatctctgagccttagtttcctcatctgtaaaatgaggctagaaatgttactaatctcacaggtaagactgttgcaaaatgttataaaattcaaatggtgcttgtaaagtgcatgaaaaaaagaaagtgctcaataaatgttagctattactattggggaactctgcttctgaattatgctgaaatcctcaagtttcacatgtcgttagcccatgcctagaccctgctcctcttagcgaggagaacagtaacagtggcaacaaagacacccgagttctactcttcagtgtttctaatttgtacgcagctcttccagagccaatttcccaatcatctaaatgatataattagtttaggagcagtggttctcaaactagagagctggtgaaaagacagactgttgggtcccaccccagttttcagaagatcaagggtatgccctagagctagcattctttttttttttttttgagacagagtcttgctctgtcgcccaggctagagtgcaaatgcacagtctaggctcactgcaacctccacctcccaggttcaagtgattctcctgcctcagcctcccaagtagctgggactacaggtgcatgccatcacaccaggctaatttttgtatttttagtagagatggggtttcaccatgttggccaggctggtctcaaacccctgacctcatgatccactcgcctcggcctcccaaagtgctaggattacaggcttaagccaccacatctggcctgagctagcatccctaacgagttcccaagcgatgctgaggctgctggtctggggaccacacttttagatctctggatcagattatttcagggttcctttccagtttaaacagtctaagattccccagtaacatccaacagatgcagcactcaagtaataaacactgctgtaccatgctgaaatagccttaaaactaagttctttcctaagtaagagtgggaggccttggaggctgagtatgaagtacatggtaaagactagttttaacttctgaactcagcagattgagaaatctaaagcaatggtggaaacaggaagagactgtccccttatctaacatgttggccccattttaatttatcttaatcccacctttctgccttttcaccagacccctccccgtcacggtctcctctagaaacacatctaggtgtctcctgaattcatttattggctttgccgcacacagtataataccgcctttgttagtctcctggcccggccccttcaagcacggtgttcagtctcggtgttcctctacccttaaaaaaaacacacaaccaaggagtctctgaaaaataattgtaaaatcaactaaggcaaattcagatgatgtagagacactcagactctaaacgatggaaaaagaaacaaattcagaacattgtcagcattctcatgtcttttttttcccccttaatctctattagtcctgttgagtaggaagtctctgccgtattggattagaaattgagtaaaagaggcctcaggcttgggagtgcactgaagaaataaatggaatgcctttagattcaagaaaagctgtcctcttggtctttggcagtccttggtaataagacaggagaaaaggtttctttctttcaattggaaggtaccatggtatagtaaagaggacactggactggaaattggtgtaatctggccttggtcctcattctgctattctctagctgtatgaccttggccaaatcaatgaacttttctgggcatccatttcctcaccacagaaatgagagggtagaaccttaaccagaaatatgtattagaaatcttttggggccgggcacgggggctcatgcctgtaatcccagcactttgggaggccgagcgggtggatcacttaaggtcaggagtttgagacccacctggccaacatgctgaaaccccgtctctactaaatgtaaaaaatcagcctggcatggtggcatgagcctgtagtcccagctacttgggaggctgaagcagaagaatcgcttgaacccgggaggtggaggttgcagtgagctgagaccacaccacacaacactgaactccagaccgggcgagaaagcaagactccgtctcaaaagaaaaaaaaaaaaaaaaaaaaaaaaaaaaaaaaaaaaatatatatatatatatggagagatttttcaaaatgcatatacctgagcctcttcacagactcagaaccgctgaatagagaacctctgaggtacccagtctgacattccaaggttcatccatcctataaagcagattaagtgtataaccaggcttaaatgagagccagggaacccatgaggcagggcagagaaaaaccggacctttttcaaagggggagggtagttagagaaattgaatccaagtgtaatcagagaagatcattcttcagtcagtatttggaatacagggctagccagatgctaacaaaagaagcaagtatttatgttcatccaacacatatttgagtagtgactacggtaggcatgtggtttaagacaccagaaatccaagaatccttatcccatctaacaggagtgacctacataaaccatgagcacaccatggtaagttcagagaagggagtggccagatatatgaacattattggtgaatactggaaaaagcttcttggaggaggtgttatccagcttgtgtcttatagtgccatgagcagacaggggagaagaccagatcagacggaatagcataaacaaaagcctagaggcataaaagaacacagcacacttacggcaccagtgaaagtctggcatgagaagaatatgtatttgtgtgcatgcacttgaacttttttggagggaaggggtatgatttgttgcagattaaactagaagaatgggctggagccagaacatgaatacttcttttctctccaattttttgctttgaagaatttcaaagaatttttaaaggatgtaagagtaatacaacaaaaactcatataagttgttttgagatctgcaacttcaaatggttcagcaaaagaaaagggtgtgtatatgtatgggtagagataaagcaaatgttgcaaaagattcagcattttgcacaatcttagatgcacaatttttttttgcaacatttgtttatctctatccatacatctacacatccttttcttttgctgaaccatttgaagttccagatatcaaaacattttacccctaaatacttcaatatgtatctgctaagaacaagcacgttctcctatgtaactacaagggttctatatgcatccttacccactctaataggagggatctatataaaccaataattacagcacatcatggtaagttctatctctgaagttggtgtagtgctgcagtaacgcagagtccgatgtgccactcaggacaggactggcaccctgactgtatgcacctatgcatctgaccagttgtaaaactgcctgaggcacctactcctcgaactcttgctacctcttaaggcctaggggtaggaaacatgtgtaaagaaaggcatgtatctaccagacgtacatgttcagtaggaccctgcttaaattcgtaagccaatcccaaaatggaattactctgacttcttagaatttagccttctctcccctaataactgactatccactccaacagctcaggccattttagaaactttcaaaagaacaactggtatctgagaacatgtattcttattttcatggcctcaagcccaagggactgtcctttagttacactcacacttttttccccccacccaagctggagtgtaacactgtgatcacagctcactgcaacatcaaactccctggcccaagtgatcctcccacctcagcctcccacagagctgagaccacaggcatgtgccaccataaccggctaattttatttttgtaaagatggggtctccctacattgtccaggctaactataccttttaatgtgctccttgtctttaaaaacaatacctttggcagtgagttttaattctgacctagagatgcaaaacagtaaaatttttatatcgtaaaatagaagaggtctgaaaatttttgtagggaaagagaggcgatttggtgacaggtggtgattacagaggcctgaaaggaaattttcagaaaaactaaagcctcctaaaatgtaatgcctttgttagtttagaaagataaaataccagccgggggtggtggtggctcatgcctgtaatcccagcactttggaaggccgagaagggcggatcacctgaggtcaggagttcgagaccagtcgggctaacatggtgaaaccctgtctaaaattacaaacattagccgggtatggtgcacgcctgtaatcccagctactcaggaggctgaggcagaagaatcgctggaacccaggaggcagaggttgcagtgagccaaggtcgcgccactgtactccagtctgggtgacagagagagactccgtcaaaaaaaaaaaaaaaaaaaagaaagaaagaaagaaagaaaataaacataatataccctatgtataacctggggtttttaaaaaatcaagtaattccattagaagatggaaaagtatgggaaaaaggaactgaacagttgatggtgggggaaacgatttatttccttttcttccaatatttaagactaacacagcaaacaaatatcctcagaataaaaaacggtatctccctgccccactttttccagtactcattctgggcctgcaggactggcttccttcattcttcagatagttactgggcacctattcaggaaaggggcaataacaggcactttggagacagatgtacgtgatcctgcaccacaggaattcacctggaagacagtcaacataagtgaataacagtgatacaaaatagaaagagtaagagctggaagaagggtagatataaatcattaaggtacttccttaggggaaactgggattggcttccagttagctgtggaaggatgtgaaggaattgaggctggggtgttagggcaatctaggtgtatgcatggagtgagcaaagacacaagacagaaatagcaaggaattcagcttggctggagtgaagggtatgtgaagcaaggatggaatgtgatgttcactgagtgcttactaagtgccaggcacatgtgctagtaggtttcacatatttaaggttcaagaagaactagaggaaatgagtttggagaggtggtctggagtgtgatcgtagaggaccttacaaagcaaaatggtggttctgagaagcaaggcagaattacacaagagtcaagttcagcccacagttcctccatttttcctaggccctctgcatcatcccatcaagcagctctgctagagagtgagcaggggaccatgaggtgacagaaggtgcattcttattccagaagtctcactgaggcaacaggcatgccagggaccgctgataagggtaaactgtaatttctcaactacagcccactcccatcccttcccatctctgtcttggaaagcttgagcctgctcattgtgagccacaaggtggagatgtctggcagggcagaactgagaggaagtcgtttagccagcctaaggttaccattaacactttgagccactgccgtgagctaatttttatgtttgttttttaagtttggttgaaatgtcacaaatggaaaaattaagtaaagcgccctggttagccacaagactggacacacctggctgcaaacccagcaaaagaaacttacttcattagtaggagaggcagagagtgaaatttacatctgaaatctgcctgcaccaggagaaagtgctgaggccaaaggcgctgtctgtttttacagctgtgtcaagacttagttctttactcttaccaacactcaggagtgcggcaagggcccaaggaaaaatggtctccaagctcttcagctgcaactcagctcacaaagatttttaagaagcagttaatgaaataaaactagaccagatgaggtgatataatgaactttatttccacagctaatttataagtttaaatcccaaataatgtttttttaagtcagaacactctaaattattgatgtgatttttgtaacctcaaatttaacacctgctttttgtaccagcttcacgatgatatatgagtctgctccatttttcacaatagttgggctccaaaaagttggtgaaaagcaaatttttgtaaaataaaaaatttcccaccaaatcagaatagaattctaatttcaaaggagtttttgatgcaaatttattattcatcactaactcgaaagtggctctcttatttcttgatcttccacacaccaatccactcaaagcaatcacctctaagtttttggcatgagaaaaatcactactacattgattggttttataaattctacattttatatgttttcttacagaggtacacctgggatgccaaataacacagagatagatttgcaaattaccaccttcaaaccatagattttcaagctgaaaaaaagctgaaaacttggggctcatgtagttaggcctcccctgtccccacctttcttttaatacagaaactgaagcacagaagaggaaagatttgccagtcagggtgagaaccaggccagactggctctacactgcctattacttctccctagccacgtgtcccatttataggttgtacacacacggaagactgagatcccctcaaacacacacatgcactcacactcatccatgcatgcactcacaacccagtgattaatatacaattgtcttgcctatataaggcatgtctatttatgccatgaggttagaaagaaggtatcaagtcaactatagcagaaagcagtaatagtaattccccaactcttccaaatctctattattttaaaaccatcatcctttagttatagtctttgtaactaaaccggaatttgggcacttctcttcatgaaggcaatttaagagcctgtattgggggaccacctaaaaccttgctattgtcccctaccccaccctgcgtcactagcaacatccgcatcacctggaagcttttcagaactgtagattttctcacccctgtcctgaaacttactgaatcagaatctgtattttaacaagatcctcaggtgaaccataggcacattaaagtatgagaaacgctgatctaaaacactcccttatggggcagcaccctatctacaacaatccaaatagaaaaaacggctggataaaatgcgataggggaaaaattccccaattcctgcaggactgcactgatatacacttggatcagagactaataaagcaggtatgatttatctaataaatgttagcttaaaaaagaattccaaaggctggtattcaatatattcatttatttgacaattatttattcatttgacaattattcaatgtttactgcataagcaaaaaactgaataagacggttttctgcttttataaaacttacagttaagtagaagggacactgcataagaagtaacatgggagaaggctcaagtgttgacaactgtgatgaagagagatggaggtccagaaggaaattcaactgtggcgagaggcaactaaaaggttcctgcagtccaggagtcagcaacctatggctcattaagctattcaggatagagacagctgtggctcatatggctagtgagacaacttccaacagagtttagtcaacaatgataagaagaacagtttcactacaggaagagctactgcgcaactgcctggcagtcagccagggctttggctgaccaggaggtatctctggccatcattaaataggactgagactgccaacaccaccttatgtccactgtgcactgctacagagttgggtggtaagtacttgagggcatgtgggaacattcagctggatgaataccttaaaggctgccgatctcactctgggcagctgtgatattgtgaaatatatagttggtcttcaactcccttcctggcatacaactcctaaaatctttggcctttccaaagtggtgtcattttgtatgctaatgattggtggctggcgcacttaggtagcttcagggtaggggctggtcactgaaaaaccaagggaggattagaaggttaggactttctgtcccatctcccaacctccaaggagggcagagaggctgactgatttccaatggccagtggtttaatcagttgtgcctacataatgcagcttccataaaacccttaaaaggactgggtttggggcacttccagatagctgaacaggtggaggtttctggacagctgcacaccaggaaaggtatggaatctcctcaccccttcccccatcttgtcctatgcatctcttcatctgtatcccttgcaatatcctttataataaaccggtaatgtaataagtgtttccctgagttctgtgagccgctccagcaaattaattgaaccaaagaaaggggtggggaaccccaatttataatcggttggccagaagcacaggtaaaacagcctggagcttgcaattggtgtggcaagttgggggcagtcttgtgggcagagccctcaacctgtgggatctgacactatctccgagtacacaatgttggaattgaattgggttagaggacacccacctggtgacctctctccagaattgactgcctgtttgctgtgtggggagaaactcccacaaatgtgtcacagaaaccttctgtgtaattgtaattgagtgagagagctgaaaaaatactttttttctctatattacacagcagctacgacagaaagaaagcaaaaaatgaaaaaggaaccaaaaaggatgattacaaagatagctctcaggcgaaggatacgcatcaactcaaaaatggttacttttctccttccttgaaggtaagaaaaaataacataaaaaataaaaaaggttacttctggggagttagactggggggaaaaaagacacttgttttttacactcaatactttttactctttgatttctattctatgagcatatgtaacttttataatatgtttatttctcagtccacagggagaactttgccctgtaatgaaagaaaccaaattaacccatttcatgacccagtcatggttctactttggatgctcccaagctgggaggcaatgaaatgcttcccagtaacagggaactacaagctactaaaacgtgatctagatacacaaaatacacaacataaacaaaagaagatactagtgggaggtgaagccagctgggcttctgggtcgggtggatacttgcaccaatcagtgctctgtgtctagctagaggattgtaaatgcaccaatcagcattctgtaaaaacgcaccaatcagcgctctgtgtctagctacaggattgtaaatgcaccaatcagcactctgtaaaaacgcaccaatcagcactctgtaaaatggaccaatcagcagacatgggcagggacaaataagggaataaaagctggccaccctagccagcagtggcaacccgctcaggtcccccttccacactgtggaagctttgttctttcggtcttcaccataaatcttgctgctgctcactctttgggtccgcaccacctttaagagctggtaacacttgctgtgaaggtctgcggcttcattcttgaagtcagcgagaccacgaacccactggaaggaagaaactccggacacaccatctttaagagctgtaacactcacagcgaaggtctgcggcttcattcttgaagtcgcgagaccaagaacccaccacaaggaaccaactccggacacactatgatctgtataaccagctatattctagtgttttggtttcatttttctattgtcattacatcccatgtgacatatatatatatataatatattcccctttctcaggttaattattaaatgtactaatgtacattttcaggaggtatcttaccagactcttctaggttgccagtgatcaaggagcttgagtttcagttcctgaagacagtgcaggccccataccagggcctcccatcagaactaatttatagaaggactggttcaaatattgaactggtgtcaaaggtatagtatccttaactggattatcatttgattccctccattcaccaaatccatccctcctatcaccacgatttgggctttacaatcccatctccatacaggatgacttcacactgacaaatcactataatgtgtacaaacacataaagtatctgtggagtattagtttccacagaggcagaaaaagtgactttagcggaactgccacttgatattaggcagcatttcacagaaatctaaaagcagggccattttacaacagataaaactccaaactcaaacccttctctggaattgtccaggacaagcatctgacagcactcacttacccccatgactctgccgcgctgctgaacatcctcccacataaaatgaactatgatacgacacatgtacttcccactccggccttcctgcttcattcggactagacacatcctgggtgggaagaagacaaaaaaagtcttggctgtttgcatttttcacatcacacatttccactgaaggtctcctcatctaagagtgagtttagcaaagggcaccaaatcaaactggaagtgaactttttttttttaaacttttactgagatataacaaagatactattaagtgtataaatcttaagtgtactgcctgataaatttttatgtattatacatacacccacacaagcaccacccagatcgagatacagattatttagggcacctctgaaggctccctcatacctggagggaaccacatttttttgttagaagacaaacaagtctgaatccttcattttactgatgaaagcaggagtcctaaagacggaaagtaatttgcccaacaccagttttatatccgtaaaactgggtatagaactgtgctgtccaatacagtggctcccctgtggctattgagcattttaaatacagctagtcaaagctgagatgtggcacaagtttaagatttcaaagatttagttgaagaaaaagaatataaaatatctcaatttttaatactgctttcatgttgaaataatatttcagatatactgggttacatacaatctattaaaatttgtttctttttactttttcaaatgtagatactagaaaattttaaattacatacatggcttgcgttatatttctgttggacaacacctgtccagaacacagatcacagaaagtattatgattacatttgtgtaattatccaattgtttcccccactagaaggtaagctctactgaagataaagatcaaatctggtttttgtcaacattttatttccagggcttaagtacagtaggcactcaatatacacttgctgaataaataaatgaacaaacacctatggttagggccaagtttaggaccttttcccctataccacatttgcctctagtcagtccagagggctttctgaataatcaagacctcacataatctaaacatacaagaattatattttattatatataggaatataagcagggtccccaacttttcaaactagttcctcatttcatgcatgaccatagttcattcttttttgttttgttttgttttgttttgttttgttttttgagacggagtctcgctctgtcacccaggctggagtgcagtggcgccatctcggctcactacaagctctgcctcccgggttcttgccattctcctgcttcagcctcccaagcagctgggactacaggcgcctgccaccacacccagctaatgtttttgtatttttaatagatatggggtttcactgtgttagccaggatggtctcaatctcctgacctgtgatccacccgcctcagcctcccaaagtgcttgttttctcctttttgagacagggtctcattctgtcacccaggccggaatgcagtggcacaaacacagctcactgtagcctcaacctcccgggcttaagggagcctcctgcctcagcctcctgtgtagctgagattacaggtgtgcaccaccacgcccagctaattttttatttttttgtagagacgggggtctcaatttgctgtgcaagcagatctcaaactcctgggctcaagacttcctcccactttagcctcccgaagtgtggggattacaggtgtgaggcaccatgcctggcagactataatttttattgtttctcattaaatagcttattaagcagctacaataggattactcacctaaaagacaattcctgttataattatggaatagttaatccaacctgacaattctatatccatacacaattgatcttgccaattaaaatctaccagcaatagtaatggtacaatgaaatgattacagcttggcctgtctcaacatctttgttaataactaagatggagaaaagaaaacatatttaccaaatttgcaggtgacaagaagctgggcaggagaacaaatgtgccagatgatccaaccatgaaccaaaaatacttcaacaggttgaatctaacaagatcaacctaatggggataaattcaggatcctgcatttgagtctaaaagaacaactgtaaaagtacagcacagataagtcatgcctacctatgtgtgaaaagacttataggcttaagttgatattatgtgctcagtaggaatcaagaggataacaatgctgccctccaaattaatgtgattttagatacagtaatgcaaatataataccatcaatgtgtaaagtgagacttttgttatactcaacacaaaccagaacgtatttggaatactatccacagttttgaacattacattttaagaaataggaggactagaagtatcttaagaagaccagaagatatttaacctggagaaaaacaggaaagttgacttaaacattgtagaaaagcaattaaactgtttaccaaagagaatcaggtcaggcctggtggttcacacctataatcccagcatttgggaggccaaggcaggaaaatcacttgagcccagatgtttgagaccaacctgggcaacacagttggaccccgattctacaaaaaatatgaaaattagtcaggtgccgtggtgcatgcctgtagtcccagctactcaggaggctgaggcaggaggatccctcccaaaaggtcaaggctgcagtgagccacgatggtgccactgaactccagtctgggtaatggagtgagaccctgtctcaacaaacaaacaaacaaacaaacaaacaaaaccaaagagttagaatcagaaccaatgggcaggccatagagggagaaagatataatcaacattgaacagcaaaattaaaagcttactaacaggaatgtctaaagttttgtttttttaattttagagacagggtcttgctctgtcacccaggctggagtgcagtgacacaatcatagcccactgtaacttcaaattcttggactcaagccatccttccacctcggcctcccaaagccctgggattataggcatgagccactgtgcctggcctgagtgtctgaagatttgaataatcaaactgacaacctcaaaaagtagagaatttgtctgtcacggagaagtgaatcaacgcttggtgggaactcgggtatctgacagaaggttgacaacatgaccaggtgcagtggctcacacctgtaatcctagcactttgggaggccaaggccagtggatcacctgaggtcaggagttcgagaccaacctgtccaacatggtgaaaccccatctctaccaaaaacacaaaaattagccaggtgtggtggtgtgcgcttgtaatccagctactccagaggctgaggcaggagaaatgcttgaacccaggaggcagaggttgcagtgccaagatcgcaccactgcactccagcctgggcgacagagtgagattccatctgaaaataaaaagaaggctgactacatgatcccaaatgagatttactgatgtgattcgaaacttgtaggccaggcgcagtggctcacacctgtaattccaacactttgggaggccgaggtgggtggatcacctgaggtcaggagttcaagaccagcctgaccaacatggtgaaaccccgtctctcccaaaaatacaaaaaattaaccgggcgtggtggtacaaacctgtagtcccagctacttgggaagctgagacaggacaattgcttgaacccgaggggtggaggttgcagtgggccaagatcgcgccactgcactccagcctggtcaaaagagcaagactcttgtctcaaaacaaaaaaacaaaaaacctgtaacctctgaccccaggtagtgcttaagaaatagcactttgtaggctgggtgtggtggcttacacctgtaatcccagcactttgggaggctgaggtgagcggattacttgaggtcaagagttcaagaccagcctggccaatgtggtgaaaccctgtttctactaaaaatacaaaaattagccaggtatggtggcgcgtgcctgtaatcccagctactcgagacactgcggcaggagaatctcttgaacccgggaggcagagattgcagtaagtcaaagatcacgccactgcactccagcctgggcaacagggcaagactccatctcaaaaaaaaaaaaaaaaagcactttgtgacaataatgaaacaggtcacagaaaaaagatttggctactttataggacacagagcctattccacagcagaaacaaactggggaaaagttcaacagtcctttttcataagacttttctaaagttaatcaaatccctcatgtcagcctctcacctgaaaagacgctgtgtgttttgatgcttaagtgttgtcagaggccaattcatcaacagcaatagtgaggtaatggaattcttcatttatttgaaaattctgtagtttgttaatacacctgccctctgaggtttaaaaggcacagattttctcagaccataaactttctaactgtatcaacatgggatgaagtgttttttgtttcacaacacagtttgttctatagcccttacagataacagtgggctcaaatggttatccagttgaaaagataaggcaaaatgaagacactttcaaaatggtgactgacaattcactcaatgaacacaggagttcctattgtgtgaaggtgtatggttggatgctgtggggattatagtgatggctaaaactagaacccagcttttatggagcagtttcctctaggggagataaggtacaccacacatcaacagccctaaaagggaatgccatagatctcccaagagaagagtgcaatgaagtttaaaaggatgacttttggctgagtagaatcagagaaagcttcatggaaaatgaaacactgtacctggatcttagaaggataagctgaagttgaagaggttgagacaaaagacaaagggaatgtccagctgatggaatgttctaagcaaaggcagggccatggaagagttcaggatgttaaggtaacaatgaatacctagattgtggggaggacagggtataggatgcagaaaactgaagccagaaaggtcatgaagagctttgaaatgacttgctaagaaaaagtatggactttgctcagcagagagtggccagctactggaagaagattcgctccttagcactgaccggagatgagtctctgagaagttaaccttttcttcccagcctcaatcctataattaaatatacaaatatcaccagggctggaaaaggacaaatttggtgaatatagtcatgtaccacataacaattttggtcagcaagagaccacacatatgagagtggtcccataagattataatggagcagaaaaattcctatcacctggtctagatgatcctgacctggtagaggcctaggctaatgtgagtgtttgagtcacagtttggtttttgtttttttcagagacaggttctcactttgtcacccagactgcagtgctgtgatacaatcacatctcactgtaacctcaaactcttggactcaagctatcctcctgcctcggcatcctaagtagctaggactacgggtgcacgccactgagcccggctaattttttaaatttttttgtagaggcagggtctcaccatcttgcccaggctggtctcgaattcctgggctcaagtgatctaccttggcctcccaaagtgctaagatacaggcacgagccactgcgcccagctctatgtcttaatttttaacaaaatttttaaaagtagaataaaatttaaaaaaacagaaaaaaggttacagaataacaatataaagaaagctatataatgtgtgctttaagcttaaaatgtcagagtcaaaaagtttttttaggttgggaacagtggctcacacctgtaattccagcactttgggaggccgaggcaggtggattacttgaggttaggagaccagcctggccaacatggtgaaaccctatctctactaaaaatacaaaaattaaccaggcatggtggcgcgtgcctgtagtcccagctactcaggaggctgaggcaggagaatcacttgaacccggaggtggaggtttcagtgagctgagatcatgccactgtactccagcctgggcaacagagcaagactctacctaaaaaaaaaaaaaaaaatttaaattaaaaagtttataaagtataaatgttacagtaagttaagtttaatttattattgaagaaaaaatttcaaaataaatttaatgtagcctatggccaggtgtggtggctcacacctgtaatcccagcactttgggaggccaaggtgggaggattgcttgaggccaagagttcaagaccaaccaaggtaacaaagtaagaccccacctctacaaaaaaacgtaaaaattagccaaatgtggtggtaagcgtctgtagtcccagctactaaggaggctgatatgggaggattgcttcagcctgggaggtcaaggctgcattgagttgtgattgtaccactaaattctggcctggatgacagagtgagaccctgtctaaaaaaaaaaaaattagcttagcttaagtgtacagtgtttataaagtctacagtagtatacagtaatatctgactcatccagagcaacttctagttctgcaagctgtatttatggtaaatatcttatacaagaataccattttttatttcttatattgcatttttactgtactttttgtatgtttagatacatttagatacacaaatacttaccattataactgcttacagtattcagaacagtaataagttgtataggtctatagcctaggagccataggtcataccatacatcctaggtatataacaggctataccaccgaggtttgtgtaagtatactctatgatgcccacacaataatgaaatacctaatgatgcatttctcaggacagatccccatcattaagcaacacatgactgaatttactttaatagaacatcattttcagaatattctgatccagaaatataaactaaagattatacctgccttttgagaaatatacaaccagcaaagattgttataacctgtacctaattttgctgatactaacagtttagaagacatggattgacacctgaaaataaaaggagggcaaattctctttttttttttttgttttgagacagagtcttgctctgtcgcccaggctggagtgcactgacgcaatcttggctcactgcaagctccgcctcctgggttcacgccattcttctgcctcagcctcccgagtagctgggactacaggtgcccgccaccacaccgggctaattttttgtatttttagtggagacggggtttcacagtgttagccaggatggtctcatctcctgacctcttgatccgcccaccttggcctcccaaagtgctgggattacaggcgtgagccaccatgcccagccaaaggagggcaaattctcattactcctaaaacattggacccaataagttcaacagaccttttattgatgcagaacactaaatattgtaactcttcatttaacatcacagatagattcttggaaactgtaactgtaagcttaacaacttacgaaacctattttaccataggctaagtgacataaacaagagttatattcctacagtatatttctggtcacaaaaacatcactaaacttctaaataaagacccaaaagacttccaatattaaacactgaaataatgtgagctatgcatacattatggcacggcacactcacacccacacccactccaataaggacaatttagacatgctaattcaccttctgtgcacatctttgggatgtggaaggaaacaggaggacccagagaaaacccacctagacagggacagaacatgcaaactccacacaggcagtggccccagatgggaattgttatttttctcctcatcactgttataacaaagtgacattgaacagaacaatgtaatttgaagaaatgctatataaaactctaccgcaaatctcattacacataaagttgtaagaccaaaggcaaagaatcagtcttcctatcaaccggaagttactgaagattcccatgagttctactgggaaaataaggttctgatccacagggctgtccaatcaccagtacaacattcagctaattaaatgctcacctaattctttccctgagtttgtgaatcgaatttactaggtagttaaggacagaaaagcagtcctgttgtgaaggacttttttgtttatcctcttcaagggaaaagcagagctgaaggctgggccaaaatcttaagaagtcagctgcctggaatgtccagacaagcagctgaataccaattcttaggccacctgaccttgaagcctatcacattcaatttacgcttgtttgataactgtttttaaaaggtaatacatgtacatagtaataaaaaccaagtctccttcctaccttcatcccctgccaacccgttcctctcccaaagacaacctcagctactagtttcttaggaatccttccacatataacctatacacacacaagtttatgtatgtgtgtattctttttacataaatggtaccttctttatcttcccttttgtgctagcattctacacatactatctttttttttttttttttgaaacaaggtctggctctatcacccaggctggaaagcagtggtataatctcagctcactgcaacctctgcctcctgggctcaagccatccttctacctcagcctcccaagtagctgggacttcaagcatgcaccaccatgcccagctaacttttgtattttctgtagagatgagatggggtttcgccacgttgccgaggctggtctcaaactcataagctcaagtgatcctcctgccttggcctcccaaagtgctgggattataggcgtgagccaccacaccaggccaacatactattattctcagacattaagaaaaaattacatctgatattggaatggaaggatggaagtgaagaaatctcaactccaactctgtgtttcatccacagacaccccagtgaaaacttttggacaccagagataatagattactactaacttatttgaccattattagggtgacatctgattgacgctgaattcaaccagttagtttatctggcaatttttcctattctaaaaatgactaacaggaagaaagaaagaaaaaaaaaacttaaatagcaaaaacggacaagtgctataattaacagttaacacaactacgtgccaggcactatgccaagtgatttggatgcattatttttcctaatttttacaacaactccatgaagctgatacttgtgtccttactgtcctcatttcacaggtgagaaaattgagtcctagagaagtaacttgcccaatgatacaaacctagtaagtgctaaaactgagatctgaacctagacaatctgatcccagagtcctacgaaggtttttgttgtttttgcctcctttaatgattagaacaaaccctccaggatctattgaccctatttttcattcagtcctcacaagtacagtaatttaagcttcaaaactagcatcatattagaaatagcacatcaggaaaaaaaaagactggctaactggaggcaagcatacctataacaagagtaactgctagcagcctagtaggaaaagaggaaatgaaaaatttatttaatagagacacgaaaaaaataacagagcaattgaggttcaacaggtacaactcagagacaatagtctggcaaaatacagttaagagttatcaggacatcctgaatcattcagaaaagactgaagtatgttgaatggtaaaagaaaactaaataggccaggtgcagtggctcatgcctgtaatcccagcactttgagaggtcgaggcaggcagatcacctgagctccggagttcgagaccagcctggacaacatgacgaaacctcatctctataaaaaatacaaaaattaggccgggcgcagtggctcacgcctgtaatcccagcactttgggaggctgaggcaggcagatcacctgaggtcaggagttcaagaccagcttgaccaacatggtgaaaccacatctctactaaaaatgcaaaattagctgggcgtggtggcacatgcctgtaatcccagctgcttgggaggccgaggcaggagaatggcttgaaccagggaggcggaggttgcagtgagccgagttcacaccattgcactccagcctggcaacagagcaagactccgtctcaaaaaaaaattagtggggcacggtggtgcatgactgtagtctcagctacagtctgaggcaggagaatcgcttgagccccagaggtggaggttgcagtgagctatggtagtgccattgtactccagcctgggagacacagtgagaccttgtctcaaaaaaaaaaaaaaaaagaaagaaaaagaaacaaagaaaaataaataaaacaaagtcaaaatggttaataaaaataaaagacttgaagatcctgctacccactgcaaaacaaagccaacacctgtcacagactctgaccatataacaataacgttgagtcattaagtaagctatttcacaatacagctcactttaactcacatcatgggtgtataccctcataataaatgcctaaatttaacattgagaggtcaaattacattttgccactgatttaaagtcataatgtcagacctctgttggaaacgagggggaattgagaagggcagggggcattatggaggggataacacacttccatgctaaaacataataaataaaaactgcccttaagaatgcaggctgggcgcgctggctcatgcctgtaatcccagcactttgggaggccgaggagggtggatcacctgaggtcaggagtttgagaccagcctggccaacctggtgaaacctcatctctactaaaaatacaaaaattagctgggcatggtggcaggtgcctgtggtcccagctactccggaggctgaggcaggagaatcgcttgaacttgggaggcagaggtagcagtgagccgagactgtgccattgcactccagccttggcatcaacagtgagagactctgtctcaaaaaaaaaaaaaaaaaaaaaaaagcaaagtatcagtgtgccaatctgtatccaggaaacaaaaaaaatgcaaaataaacttaaaaaaatcttgtaatgaaaaagattcctatattaattaactaatcatttattgaacaagtattactaagcacctactctgaatatagactgaatctgtgcagaagctactactctgtttaggatcaaactcaagttgctcctcccaagtttgatgtgtcacccaggctggagtgcagtggcatgatattggctcactgcaatctctgcctcccgggttcaagagattctcctgcctcagcttcctgagtagctgggattacaggcacccaccaccacacccagccaatttttgtatttttagtacagacacggtttcaccatgttggtcaggctggtctcaaactcccgacctcaagtgatccacctgcctcagcctcccaaagtgctgggattacaggcgtgagccaccgcgcctggcctgatgatgttcttaaacccacaatttattatttaggttttaagcttcacagtactatccttgtctctcagtgattccagtggctcatacataatactgatctcttttacatataagaaaggcaaataacgcagctagcaaagtaaagaaaaaaaggagtgttcaaacctggcgtgcaaatatctctaaaaggcaagcatggagacgggacaaaggaagaaaatgtcactcactaggaatatcaaataataaagggctgaagctatcaatcctgccttatagaaaataataataatgattactaccatttactatgttctgtaatgtgagacttgtcactgtaagatgcatttacattcattctgtctctcaggacattataactgtccccgtttcacagaaaagaaaacacactctgaagaggttaagtaacttaaggttgcacggtagagaagaaagaagctggaatgaagcctgagctcccccctttttctcccattctgtgatagcaccaagaacctcttcctgctaaataagacaaatcggaaggcaacaacactgtctgtagagttcaaaggaataggagagtttcctagctatgatttcctcctgtcagcctaaatctgggagggaagattcttgttattcctgatgctgacctcctgccaggtactggcagctctgagcatcctgtctcgctcactctgcttgggccctctgacaatgccagttgtgttttggccttgtttctcccacatgatagtttataagctgcttagagtagatctgattttgaattaataaagactagcaggcacttgggcaggttcgtcactctggctgctatgaaggaatcccaaaggggactttcacacagcatgtttcccttactctgtcaccagctgaggccaagaaagcagagcctagatggctacactcaagccccagcagtgtgctaatgaatgagtttattgatctgtaagctggcacactgacccttttccagggctgtgtacatggctatctccacctggtttcccaaactccctcactatgaagcctaacccttctggggggagcatgagggccacaggacagcctgtgggcaaacagacaagttgggtgaggcacttcctgaagccatctcacctgacaacgagcctcctccaagagctacacctggcctgcagcttgcctgtcagatccactataaagaataagcccctgggtaccaggtatcagcgcacttagggtatgcaatgctggtaaaatgctgctgcataggcctttggtttgggcaagaaagctacaagcgtgggtgtttgaacactgcaactctggctgggggagggcaaaagaggatgtgcacatggccagggctcaccatgtatagcaggcctggggttgctggaatccagcagaagcctgaatgccctacagctacatcaaaagtgctgtggtggttttaaagagcctctgcagaggctgccagtgtctgccggtgcagttctctggctgcgctgagactggcaccagtctgctttctaaccctttcccatccccacactttaattccttcttttctttcccaaaggcttcttcccttcagcttatgaaatcattccagtgtttccccattttaaaataaaaaacaattaatgcttcccttctgaactgtttttccctcaagcgatcatcccctcatttgaaacttcttgaaaagtagtttacaataacttctttgcctcttaattactcctcaatcccatatagtctgttctggcccccagaaggccaaggcaactgctttccttgaccatccccaggcaaccccccttcccccgtgatcccatataatctgtacatcaccctgtgctagtttcaggtttacctgtggcctctcccaggacacagatagtgagcgccaagaaacacggggcccatcatacagctggtgatccgtaaatgtttgctgtgctcatatgacatgttcatactcaggggaagagacccctatcccctgaccaccaaataggacaatcagaaaggaagcaaagtgtttagaaggggcaggtaaccatagttaacttcagagttgtctcgggtcagccactactgagtaagtggcctgagacaattccttaaaattgccaaaactgtctccccatttgcaaaatgagagaattggactagatctgtagtttttaaactacattctgagtttccatggaactacttaacagtcttttttcagtggacatgttgtgaagatgtgaagcaagcaggtcattcccacctcctttcatcatatttatcatatatggtggctgagcataagatttcatttttaaaaaggactctgctgataaaaagtttgaaaaccactagatccctctacctggaaggctttttcatccactctttcacttgctaacttctactcaccctttaggtgtcaatgtaaatgtcctcttcagtgaagccttccctgactgacccacccctaaactaaatgaggttcccagcttctcccacatagccttgtcacatcctctcattgcacctatcacagttgtattttattagtgatttgtttaatgtctctcttctcacctaagccttaagagggcacgaaataaatttgtctgctgtacacagtaccttcaatcaagagaataaatgccataattttatgaatctatgtttaagtaggtactttagtattaattaacattaatttaagtatttaattagttactttagtagttataattactaaagaggaaagcaacttaatgctttcagttagccagaccagcacctgaatttcctctccaccacattctaactacttctttgggaaagttctctgacttctctaagcccctgatccctcatatgtaaaatgagaataaagtagttgtgagcatgtgtgaaataatgtatgtaaataaataaatgataatatacataaaacacctagtagtaattgtatttatgaaatacctgactttaaaataatctttaaaaacagactacattttactccctctccatcgtacctccatcataggtatgttccaattttatttgttccattccattttgtaaaattaatttctgcactgagaaggtactagtgctccatgacaatttgaaaaggggagtctctacaaatctgttaacacttacaatgccaacacaaattccaactacataaatctccctgcccagaagggaaggtttcaaagcagagataatacctgaattggatactgaaggaaaaacaggaatttgtcaagtggagaggcgggggaagggccttctaggcagaagaaactttgtgcagaagacttgatatttctactacatagttttgctttttcttgcagagaagggagtagtgatggtaatagtgcctaaaatagcaacaaatgagactagtaaaggcaccataggtcacatttgatcagatgtgaatgccatgatatgaaacttttattttattttattttccgagatgaagtctcgctctgtcgtctaggccggagtgcgtggcgccatctcggctcacagcaacctcagcttcccaggttcaagcgattctcatgctttagcctcctgagtagctgggactacaggtgcccgccaccatgcctggataatttttttgtatttttattagagacagggtttcaccatgttggccaagctggtcttgaactcctaacctcaggtgatctgcccacctcagcctcccaaagtgctgggattacaaccgtgagccactgggcccggccaaaacttgtattttattctgagaacaatggagaacattaaggagtgagtgcatgtgtgtgcgtgtgtgtgtgtctgtttgtgtactgaccccatttgtactgagaaggccaatggaatggggatagggaagctagaggccaaagaccacttttcaagtactgttggttgcaactcagtgaaatcaatttagtgggtgacattatcaatgtctgtttaaaatgaattcaaatggaatagaaaatatcaggggttccctctctcagccttggagcctcctccctctgtctctgtacaggggagctgcttctttcttccttcccccttctttcttttctttcttgcctattaaactccttgctccttaaaactaaaaaaaaaaaaaaaaaaaagaaagaaagaaacaaaagaaaatatcagagattacctgacattataaggataaattttacagaacttctgtatcagattcatgtgtccattctggtcacaaagtaacatgcatttgttacgatgggtcagagtcaaaaaaattttgagttaggtgactgagcaggtgaaggggtgagagaagagacaaatgagggctcccaggtttctggtgtgggcatgatgccagtggccaagacaggatataggggaggaggcctgcttttatcaagtccacgtggggatgctagacagcgcagacagtggcctctctcagcattttttcagcagccacagtcaatactaatcttgttcagcaaagacaatgaacacatagtcattgcagctgcaagctcaagtgagtatacaactgataagggtcctctaggagctggagggtgtcccagtcctaaatcctaaaccacagaaaaactgtgaaactaaaaaaatcagacaggataagtgaaacaccatttcctccagggaactaacagggtgtgagaaatcttgtccttattctaagagtcaacagggaacccttacccttgggaacctaagcaaaccttctgaaatgtcagcgaccagggtatttttgtttattagtagtttgtttggttttggttttgtttggcggaggaggcattatttctacttttctgttttctaagcctcctcccccaccccacactaccacctccaagaggtacttcaacccctatgcctccagcaagtccactgagtcctgtaatcttgatgtggctatccttcggttaccctcctggagcttcaggctaagagagcagggccaatagaacatggcttctccacagacttggggtggatccatcattcctcctaacagcctgcccaccccgcccctgcacgattccattagaagaaagacttctccgattcttggaggatcacagcacaactgagccccaaactaactactttcctggtgacccttccactacattcctcaataaacctgccccagacacatcaggcaactggctgccctcaaatactccatgttcttgtacacattctatcttttgctcctattattccctcaatctaaaatgcccaccctttctctgacagaaattctagtcactcttcgtggtgcatctcaaatgtcacctctaccacaaagccactctttatccaacactccaccccatcaccaaatctggatttagttacaccactttgtgcttccactgcatctgcctgtgtcttgggcacagcatttctttcactggcatgcattataggcaatcgtgctttatgtctgttttccattagacttacatttcttgaagatacagacacagagtctgtatctgatttgcccaaaagaaattaccagaaaagaatgcatgtcatacccttctctccaacatcccatggtcctgcacacataggaggtcctcaagaagagtgctgattcaaactgaaaagctacagattctttccaccaaaacctgcatatcatcagaactaggcgagagaaagagtggaaggggaatcaagtatagatttgaagcagacagcttccctctctcaattgaactgggggtggtacaccctactcctcagaaattaaaccaacctcagcaaggaagattaagcaggcacagtttggaaactttaaagaactataagtagtttcaaggttctcccatctgctgttagtcaggtattgaccttgggatgtggtcacagggattatatattttattttattttgccatccactccctctaacactgatacctctagctatatgggcaataaagagtctttcatacaggttctgaatattatctttgagttcccctagccttcttgcaaccctcccacctttccagtgagtaattttacagtgccacctctacagtcctcctctcctaaaaaagcactttttcccttcaatatatgcagcttccttccctgaacgctatgccttacccttcaccattcagacaacaagatggcaggcagtgtgccttttaagctacctgatgcgtggcacatttcaaagaactaacaggtagaagtataagggttttgatagttgcagcttcctttgtgatcctataagtacttcttactcatatttattatataacttaggcattctgatttataattgaccattttacacatcttatctccctcactagactgtgagcttcttgagaactattccctagttcccacaaagtgcccaggatatggtgtgcacttactaaactactgcttagaaaaagatagcataggctgggcacggtggctcacgcctgtaatctcagcactttgggaagccgaggtaggtggatcacttgaggtcaggagattgagaccagcctggccaagatggtgaaaccctgtctctactaaaaatacaaaaaaatcatatgggcgtggtggtgggctcctgtaatcccagctactcggagggctgaggcacaagaatcacttgaacctgggagacggaggttgtagtgagccacaactgcaccactgcacttcagcctaggcagcacagtgagactatgtctaaaaaaaaaaaaaaaaaagcataaaataaactgccaccttaggcccctaagccaaactcagtgtaactgtgtgagtacagaggaagaaacatttcagaggtgatcaaaaccaaaaagtatatagtagtcagttgtatgatgcaaaggttcagctgaaggcagtctcaaacaagggtccttttgacagggcagccattcccatgttcctcagatactcactatggtcaaagtagtaaacttagttctccagaatttactttcccaagatctggcagttcaataaatacattccccagcccctgacttcaacgactctcctatatccttctgacctttaatactgtgtaacattagatgaaaaattgattttttttggctacttatttcacagctgaagaaaaaatatactgtttaaggtgttaaatatttttacatgcaacaaacctggcatgaagctaacttgtatgcacattttagaggtacaggcgtaaatgtcagtgctataatttgttataggtttctgatgaccagcaatgaaaatgaccacggattctcacaattcaaaccacttttacgtaaatgtgaactttcctaaaacagccaagggagagaaaactttccatccaagctcatagagtgtgttaagagatactgatagcattgttcactgggttaggtgttctctgaaaaaatcctacaaatattagtttccttctgggcttatgctttgacctttaataaaaatgtgcttcaagacaccagttattaaaatgaaaggaacagtttttaacacctgaacaactgccatttcatataatcagccctcctgaaggctataccttacaagtcagcagtgtttaaaaaaatacatttggtgacttcatttaaattgctcacttaccagacgtggagtagggttataagaaaccatgaattgaatgtatcaggcatctgacaccctagaaaataacaataaggtataagtatgtgagggtttaaaggaagcatattgaccatatattaaatattggcaggcacggcacttatggtgctctctgattatgctattgcagaaaagtccagtagaacaatagggcgagaccacaggataaaagaactttgaatcatagcacgccaggagtaaaagaaaaaaaaaggatggatgcggtggctcatgcctgtaattccagcactttgggaggccgaggtgggcagatcacctcaggtcaggagatcaagaccagcctggccaacatggcgaaaccccatctctactaaaaatacaaaaattaaccaggcgtggtggtgggcgcctgtaatcccagctactgaagaggctgtggcaggagaattacttgaacctgggaggcggaggttgcagtgagccaagatcacgtcactgcactccagcctgggcaatagagtgagactctgtctaaaaaaaaaaaaaaaaacaaacaaaaaaacaacccattgaatttagtcagaccaccagccttctagttccagccctgttaccagcttgttatgtggccttggacaaatcacttctcccctttgagtcttggttttctcactttgcagaatgtggcctagatgatttctatggttccttccagcttccgtgtgcttctacagtattttccctccatgggcttgaattctgaaaagctaggcaaacactcccttacttttttcagttgggctccactgagaagcttaagtctttctagtatccttttcctgtcttctttctctaaggtacccaatgtgctatggatatgggtgtgctaaatgatttgcccaaaagaaatgaccaggagctgggtgcagtggctcacacttgtaatcccagcacttagggaggctgaggtgggtggattgcttgagcccaggagtttgagaccagcctgggaaacatagtgagaccccatctctacaaaaaactacaaacattagctaggcatggtggcatgcacctatagtcccagttacttgggaggctgaggtggaatgatcacttgagccagggaggtagaggttacagtgagccaagatcatttaactgtactcacgcctgagtgacacagcaagaccctgtctcaaaaataagaaaaaagaaaaagaaaagatcaggcgaaaaaaatcagggctctagggagctgcagctgaataagaaagcatattgtacttactgaaaggctgttcatcacccccccagaaatgacaaaactgggaagggcttctccttggtttcagatcccacaaattagttctgtgctcagacatcaaagcctctcaattctcactcagctaagaaaagcctcctgctggatgaggggtctcccactgaatgtgcccgccttattacataacagggagaaaagccagagcaagaggaagatgcaaaaagagaataagtggggaatttgggcccttatggtagaatctgtcctttggggcaatgactcaagaaagaagcgctatcctctgcttttcagcaaccatcaaggtacatgatgtactaaatgataacaaagaggggacactaggagataacacataggcccggacccccatgaggtacattaacagcaccaataataaagagctgtaattcactgcgggcttactatgtgccagatgttctactgggttctttacatccatgagctcaatgaatcctcccaataaccctgaggtaggcattgatattatcccaaattgacaggtaagaaaactgactcagagagaccaagacaattgctgttcaaggtcatacagctatgaaaagagacacctgagatcaaattcagatctacttgattccaaacactgtgttcttaatcctgctctaacagcctctctaataccactatcagaaactaactcactaagggcccatctgcataccagatctactgcaagccatgtcaatacattatctcactcaatcctcactttaaccctggagggaagcattataatcctcattttagagatgaggaaacagactcaaactaagtaacgtgtgggcagccacaatattaacaagctagtggcagggctgcagtttgaatccaagtctgtcacaaagtgacaccaaaatactttggtgagcttactgggaggtgcctagcagctgtcaagtcgacttcctctcagagcccagcaggagggagctgaaggctggcctggccagccatacagctattaagacacatgccatctgagaatgggccaaccaccctccacctagacaagaatagccctgagaaactctgaagcccggatctgaagttgggtcttttttggatgctagaacaaaacattaaaaagaaaaattttcttggaagtctgtctttcaatctggaaaatgaaatttggctgcttctaaaggacaatctgttcaattgctacctctacatcaaagcttctcagcagcctccaggagcctttccaattttctcagagagggaatcagttcttgggctggaaagcacagacagacaggccagcagctggacttgggtcaccatttccccttctggggtcacctcagggctgagggtgggaaaagtgctggcatatgattgagtccctatacacactggtgtcagaacagaaacccacagggtaaagccctaaaaagtaacaccattgactgttgactgtgaactatgcaaaaatacagcagattctttagttcaatgaaatgcatttaaacacttcaaagttaaaacctgctgtagtattttgccatgatcacactcttgctccaatgcacattcagtgctttagtttctgaagctaggcactttctttcttgacatcaagttggatacaattaaatagttcattactgttatggggtggcagcataacacagttgtacatttaatgtggggtcagactgcctgattcaattctttgactctacctctcactcactatgtgacactgggtaaaattactcaattttcttctctgtaaaaatgagaaaaacaagataactgaccttgtaagatttttgtgagaatgagataaggcctataaaatgtttagcaaaatggttagtattaagttagtaggtactcaataaatattcactattgttggttttcagcaaattatttaaatagtagaattgaaattatctttgaaaaaccccactaattatttcagattgtatcagtgataaacctcaaccacagactcagaatgtattcattaaggagcctcctctccaaggcctccagtctcttaagggttaaagacaaagcagtctgcagacaacactgtggaattcaacaggagctctactgattgaccacctctgctccaaagtgctcttcacagcaaacatctctaaaagaccagtcagcaaaccgcagtgtactcatcagtgcaacatgctcagacaaaagacatcctcaaaatatctaagaaacagcgggctgctgaattctcaggactccaaaagttaagccctaaaataccacaagtccaagtgagcaatgaccactttaaaaagtacaatcttgggaagcaatatatatatactgctttctcttgtttctttttttttttttttctgcccaggctggtcttgaactcctcagctcaagggatcctcctgccttggcttcccaaactgctgggattacacgtgtgagccactgcacccagcccctttctcttatttcaaacctgtctggcctactctttagaatccaagccacaggaaagtcagtgtaattatttgaaagatatttgtcatcttctgcatccagaaggtatattccagatttgttccctttttattcactagccacagtttggaagcactttggtttgatatgaaaacttaatctacccacaaatgacaaagatgggccacaacagaatgtaataaaaatgaacatgctataggtctcaaaaggaaattctcaaattgagtctcagaaaacctgaagagtagcgttactaaaaaatttactttctccctaggtaactacttcaaagactaagctaagacaaagctcaccaatagattcacactataattagtataaacatcagtttccaatactaatagaaaatctcacagaggtagtttgcatttaaatataacaaaatacaaaaaatattaaaatgaattacattttctaatttgcaattacactcattcacagacaatatgttatagtggagaaatccctggattttaaaccagacaacacaggttcaaggcttggctaggcaaccctgggtgagtcacttagcccctttgagcctcaactgtttctgaaaacaaaataaaacaaaatgaaaacagtaatacaagcccttcctagcccacaatattttgtaactcctaaatgagacaaatataaaaccatactatatgagctaatagtataaaacagttatttataaacttttcttaagttttataagtagtttacaccaggctatgaattgaaacatgatatgttaaatacgtaaaaagtcttattattcaatactacaatattaactgaagaaccttcaataatgaacagctggccaagacaaagttatctagtaaacatcctttcaaaataattctaagaaatttctgagttatttattgaatcaaatataaaatagacattaaatagacatctgaggatgagggttttttttgtttttttttttgagatggagtcttgctctgtcgcccaggctggagtgcagtggtgtgatctcgactcactgcaacctctgcctcccgggttcaagtgattctcctgccttggcctcccgagtagctgggattagaggcacccaccaccatgcccagctaatttttagtagagggtgggggtttcaccatgttggcctggctggtctcaaactcctgacctcaagtgattcacccacttcagactcccaaagtgctgggattacaggcgtgagccaccgcgcccagcctgaggatgaggttttaaaaagacctgatgaaaaatacttcacacatggattcaagaaggcacttaaagaaaaaaaaaaaaaaaaaaaaaacaggctgggcatggtggcttatgcctgtaatccctgcacttcaggaagctgaggcaggatcacttaaggcctaagaccaggagttcaagaccagcctgggcaacatagtgagaccctgtctctacaaaaaataaaaataaaaaaatgacccaggcataatggcatgtctttgtagtcccagcgactcaggaggctgaggtgggagggttgcttgagcccaggagtaaaaggatgcagtaaaagggctagagccactgattccagcctaggtgacagagcaagatcatctcttaaaaaaaagaaaaagaggccgggtgtggtggctcacgcctgtaatcccagcactttgggaggtcgaggtgggtggatcacaaggtcaggagttcgagaccagcctggccaatatggtgaaacctcgtctctactaaaagtacaaaaaaattagccgggcatggtagcacatgcctgtaatcccagctacttgggaggctgaggcagaattgcttgaatccgggaggcagaggttgcagtgagccgagatcacaccactgcagtccagcctgggtgacagattgagattctgtctcaaaaaaaaaaaaagaaaaagaaaaaaagcagtttctaatattaatagcttcatcagatagagaaaaaatattttttccttttggactaacttatcctagactaacaaagaagcaggaaaatattctttccaggttatgaataaagaagaaaggaaaggtgaacactaaattggaattataattcagtatggtatttcagtttttggtgtcaatctgctgagacagtaaaataaaatgatttgtatttatttgatttttaaaaaccaaaataggccaggtcccatggctcacgcctgtaatccggaactttgggttgggagactaaggcaggtggatcatgtgaggccaagagtttgagaccagcctggccaacatagccaaaccctgtctctactaaaaaaaatacaaaacttagctgggcatggtggcgtgcacctgtagtcccagctactcaggaggctgaggaacaagaatcacttgaaactgggaggtggaggtagcagtgagccaagatggcaccactccactccaatctgggcaatagagcaagactcaaagcaagtctcaaaaaacacgatgcaacaaaaaaatagttattaaataaccaaaactgcacccagctttcttcattgttgtgaacacaattatatacaaatatttgctgctagagaaaaatctcaaatgtatacagttaggtgtatgctgctttgaggatgtgactattaccacagaagtacacagcatacatttccttccaaaacctgtggaactggaaatgatttaatctctcccaattacaagtacctgctttaattaactttgttaataatataactgtttacagcatcaaaattaatactgtgataacaatcaactgcttctgacagtctaaaccagcaaaacccttttggaaagcaatttatcaatgagatatacataataaaattatatatgccttttgacccaatagtcttttaacatgagaaaaatcataattaatccaggattaattaaaacaattaaaaattaaaaacaggaatagctggccaaacgtccatgtcaaaatgctaagtaaaacatccagaatgggccaggcacagtggctcacgcctgtaatcccagcattttgggaggccaaggagggcggatcacgtgaggtcaggagtttgagaccagcctagccaacatggtgaaaccccatgtcaactaaaaatacaaaaattagctgggtatggtggcacatgcctgtaatcccagctattcgggaggccgaggcaggaaaattgcttgaacctgggaggtggagaggtggaggttacactgagccaagatcgtaccactgcactccggcctgggctaatagagcaagactccatctcaaaaaaaaaaaaaaaaaaaaccatccagactgtaaaacagaatatgtttactatgatatgaatactcttatgtaaaaagatgcatgtgtggacaagggagataatgtcaaagtacagtttgtttgttttttcaaaataagcaaaatgttttatttataggatccttttgctctctgtttactctattaaaaaagaaaagcagctgggtacagtgccatgtgcttttagtcccagctactattcaggaggctgaggtggtaggactgcttgagcccaggagttttaggccagcccgggcaacacagcaagacccttgtctctaaagaaatatatacaagaagttttttaaagagacaaatagacagtttggattatatgctttgtgcaggaaaaactgtttcactagggactaaaaaaacctatcctattaaaacacaaccataaaaatgaaatgtagatttgttctccttttcagtactatcaaacaataacttacttagaaagaattcctcgaagtcagttttctccacacagctagtatacatgcgcagggccgcaatcttaatcttctagacaaagagaataaaaccaaactcaagacatgaccaagtggatgttctacttccattagacatgggtcacaaaatcttatatttcttcaactagaaggaagggtccaaaccactctctaggtaatttaaaccaatataaattttttttgttttcttagagcttagccattcatacagacttcacacaattttcatattttaggactttagcatgaaaacctcagaaaggcttttccaatatttaaatgaaatctctcatttaattccaacctacttcaccacatttgtgcctctaaatcactgttcagcattatccacattaactctttagaatctgaaatcctttatagtaaaaaagtacacattcttctggccaaaatcaaagaaatatacaaaaaccctcaagcctttaatctttcctcagaggcactactatctattctataaatctcgggggatggagtaagcggtatcttttttccagatctttaattttatagtttgctgattaacactgtgtctgtaaataagggtttctaatgactgtaaaatacaatataagaatcaaacttttactattcccaaagcactaggaattctcttaggcttttgatatgagtggtggttttaattttttcactgagctgtatacttaagatttttatattacactgtatataaattatgccttaataaaaataaatctaaaaataaattatttaagagttgacttatgggtctgaagaccaactcagcactctaggaacaggtattttaaggactttcaaaacatttcattaaggatataactaaataaatgagcacttcaacaaggcttctagaagcttattttttcttataacaacagggaaagttataaactcaaatatgcatagaccaaaaacaaatgtgtacaggctgagaatgacatagcaactgaagaaaaaccaatctagaatttagtggagctatgatactaaggtttaaagtcaccaagaacatactatacccaaaactatataatgttcatgtttttctaaattctctagagttaaagcaagtgtctctgatgggtagaaatacccatagcaaattaaagaatgattacgtctctgattgtaattaagatattttatttgctaacttgagatctgtcatgtttttaagagcttccagtctaaagttaatacaggggaaaataggacatatagaaatagacaaataaaaatcagatatccctatctggggagtaaatcagcattagaagcccacgtttaaacaaaacccatggtgaaatgctagaaaagcaaagcaaattaaacctaaaagcaagcagaaagaatgatatagtaaagatcagaaatcaacaaaactgaaacaggaagataaaatacagaaaattcaagccaggccaggcatggtggctcacgcctgtaatcccagcactttaggaggctgagacaggcagatcggctgagcccaggagttggagaccaacctgggaaacatggcaaaacgtttccatctctaccaaaaatacaaaaattagctggccatggtggtgtgtgcctatagtaccagctactcaggaggctgaggtaggaggctgagcctggaaggcggaggttgcagcaagctgagatcacgccactgcactccagcctgggtgacagagctggaccttgcctaaaaaaaaaaaaaaaaaaaaaaggaaaattgaagccaaagccgtttctttaaaaatatcaataaaattaggttgggttgtggtggctcacccacccggctcactaatcccagcactttgagaggccaaggcaggaagatcaactgaggtcaggatttcgagaccagcctggccaacatggtgaaaccccgactctactaaaaatacaaaaattagccaggcatggtggcaggcgcctgtaatcccagttacttgggaggctgagacaggagaatcacttgaacctgggagggagaggatgcagtgagccgagattgtgccactgcactccagcctgggcgacagagccagactccgcctcaaaaaaaaaatcaataaaattgataacctataaaactgatcaaggaaaaagaaaagcccaaaacacataagatacaaattttcagtatcaggaatcagagagcagacatcactgcatatcctaaagacattaaaaggataataagggaatcctatgaacaactttactccaatgaatgtgattacttagatgaaatggacaaattccttgaaagatacaaactattaaagctcactaaaataaataacatgaacagtcttgtatctattaaagaaattggatttgtctttaaaaacctccccacaatgcaaactgcagacccagatagcatcactagagaactgtactgaacatctaaagaaatgttatgaaatcagccaggcgcggtggctcacacctgtaatcccagcactttgagagactgaggtgggcggatcacgaggtcaagagattgagaccatcctggccaacatggtgaaactccatctctactaaatatacaaaaattagctgggtgtggtggtacgcgcctgtagtcccaggctgaggcagaagaatcgcttgaacccaggaggcagaggttgcagtgagctgagtgcgccactgcactccagcctggcgacagagtgagactccatctcaaaacaaaacaaaacaaaacaaaaaaaaaaagaaaaagaaaaggaaaaaaggaaatgttacgaaatctacacaaactctgccagaaaacaagaagaaaggatatttcccagctcattcaataaggccaaccttatcctgatatcaaaatcaaagtcattaggagaaaacaaaactacagaacaatagccttcatgaacatagatcattgatgcaaaattccttaagaaaatattttaaaattaaatccatcaatatttttaaaaggatagtatatcataatcaagtgaaatttatcccaggaatgcaaagataattcaacactgacaaatcaatcagtttcaccatatcaacagaccaaaaaaagcctgtttaattttgttaacacttgcagttctaggaagtatctgaccacagaacacatcttgggaagcactggtctgtgccattaccaaactaatgataatctaataatatcatgatcctaataatttggccttgacaggcctactcctatccttaagacagggagttcaggacatctgccctagctcctcacttcatccaataattcactgagtacataactcagtgcctggcactgatctggatgatgagaatagagcagtgggcaaaacagacaaaaatctctactctcatggagcttacggcccagttcagctacagacaagtatgtaactttaactaaaatttctaatcatctatttcttgatttttttaaatcttgtaatctccttcagattcctatatataaagtcctgggttcataattaatcaccttgcctggagacttgccttcaaggcccaaggcccaagtctttccttgagaaggaagcttccccaacaacacgtttgtgaaaaagcattcatcacaaacaatgaagacttcaccagattggccagagtatgttttcagtgctcatgctatggcaatcaggagcattttatagttcttcacttttcctgctgcaaggccaagcctttatacttgggtgagccattttcctggacaaatctctaaaacaagtctctaaagactatcacacagagactggaaataataacttgaggaaagaacctcatcaagaatcatgcactgatctgagttaaggacgtagggggactgaattttcaaccagtcaatacaagttgttctggtccttggatgacttcatatttatttcattttaattttagaagacttcatcagtcatcttttacttgagtaaaagagaggcaccttgaacagctttaggaaatgaaaatctgctctcccacgaactaatgcattttttaacatcctacaggatgaaaaacaaatctagtaaaatgcttgcattaacagctatgtaagagtttgaaagggcctggcaaggtggctcatgcctgtaatcccagcactttgagaggccgaggtgggcggatcatgaggtcaggagttctgagaccagcctggccaagagaccagggtggccagtatgatgaaacctcatctctactaaaaatacaaaaattagctgggcgtggtggcaggcacctgtaatcccagctactcgggaggctgaggcaggagaattgcttgaacttgggaggcagaggttgcagtgagccgagatcgcgccactgcactccagcctgggcgacagagcgagactccaactcaaaaaaagataaaaaagagttagaagggtgttttaagtaatttgaaccttctattgtctactggaaatccttctacagcattcttgattcacagtcaaccatctgggcctctgttcaaacaagaccaatgaccttgtaaggctacctgtcccacctgaggacaattcttgttagattcttattttgctaaacttaaaatctgcttcatataacattcattgaacattattctgcccactggaataccttctttttttcacatttgcccctcaaatacctgagaagaatcatcctgtcttctcttttccaggctaagcatccctatttccttcaaccgttcttaacagtttctgaaatgttcataaggctcactgcctacctctgaatacattccagtttgtcagtgtccttcagaataggaataactttttggcttaatgctaatatggaaacctattctatggcatgtggctgagttgggtaaatattgtgcttatctcacctgatactgcatataaaggtaattttttaaaatgatgattccaagatactcaaataggtaagggaaagctacatttaagatcctaaacatgattatcaaacatgggaataacacatgaaacctaaagaaaaagatagagaaaagatagctgatactgctgatgtggacagacatgcaggtattttactccctaatcaaatacatgtgaaaacacaaaacaaataattttgccagtgcaatccaatacaagtgcattgatttgagtcaacattgctgaaaacggttctgtttttcaaaatgaaaagttacacatacattttcacatctcaattacactagaatgtcatacgttgatattgtgatgtaacaaattttaaaatgaaggttataggctgggcgcagtggctcaatcctataatcccagcactttgggaggccaaggcaggcggaatcacttgaggtcaggagttggagaccaggctggcccaacatggtgaaaccccatctctactaaaaatacaaaagtcagccaggtgtggtggcatgcgcctgtagtcccagctacttaggaggctgaggcaggaaaattgcttgaacctgggaggcggaggttacagtaggctgagatcacgctactgtactccagcctgggtgacagagtgagactctgtctcaaaaaaataaaattaaaattaaataaaataaaatgaaggttatagaaagtacacaccatcacatcacaagagttttaaaatgcaaacattagggatttagttgatgtcacaagggaaccaagaaaaatcagaggctaacttaggctaaaagagcaaaggaattttcctgatgatttagtaatcctccaaatgatagccaattttctctctagaatcattaaaaaacagcctagacaaaacatatggtagcaaccaagtggaacccaatcaccaagaaatgaataaaactgtaaatgtttcttttcttttttttgttttgacttccctcttaatttctaattttcaaacaaaacatatactttaagtttgtaaatccaaatgccataagcataacatttttttaataggggaaaagattctggttaaaaacattaccaagtatatcaacaattatcaagtgtcaaaaattaagatattaaaaaatacaactttaaagaacataactaatatttcattggcaattaagaagatacttcataaccttagggactcaagaacatcattgtcagtatttgtgttctttctatattttttcaaagctccttaaaaacaaaatgcttgtggaattactgttcacttttcagaattcaggtaaaagagtaattatagagagaagctcatatttgctgtagtgagaattgttagaaagagaaccagacaccataagaagaaaccacaagtagaagtctataataaaattgaaattctaatttgaatccaacttgttaaaatggtgtaagtggcattacttggttgttctcagtaaagcttatatattttctagaaaaatcttccctactgctttgagtgggcttgctttgacttatgactgattaggcttacccaatattccagcaaccctgaaaggcattaaaaggcacttctgccatagtgaaagagagaaatggtattacaggttgagtattccttatctgaaacgtgtggaaacagcagtgttttgaattttggatttggggggattttggatgctttgcattatacttaccagctgagcatcccaaatccaaaaatccaaaatgctccagtgagcatttccctggggcatcatgtctaaaaactccaaacgttttagattttgaatttccaattttccaatttgggatgctcaacctgttctaggagataagtgggctgagaagaactgaatcgctgatgttttatttctataattggttagaggtattattataaaagcccaggggcagtatgcatctgaggcagagaggacattcattcatttatagccactactattataacagataatgtgctaggccaagagttgactgggagtgacatggttaacaaatatccctccataataagaattacaatagatcgtgggcttaattagttaataaaaagatgattagtaaaattttaaagaaaatcccttataaaatatgggtccatcagaaagtaatgcttccttaagaatgttgccaatcagaacatttggcccatctgacccctcagaagtcatctatatggcataccatgcagcaagggcctggaaagcccagtcttgttgccatgcctgctactatgagatgcttctaaggaatcaggtggagggactagttcagccccacatgttgtatagatctgactggaagcagcaagaggttgtggcacgtgggcaaagatattttgaagaagttatcagaataatgtatggaccttgagagcttacttgggaggttctggcaggggagtgcagctactcatatacccttgatcaaagaatggtcctcctctattggagaaggtcatcctcttcaaccaagaacacagcttcaaaaaggtcgcacatagagtggtcaaggaggaaggggacacccgcctacccagccagatcagccgaatcaaccctggtgatcaatggggtgacagatgtcgcagctagatcgtcctcacatccaaaataatgtatgaattccatgaaagcaaagcagaagctttaaaaaatctattaggagcagaaagcacaatgcccaaaaggaaaaatgagaagaacttaaaggactttacccatttactgtatttcaaaggtcccgtgaatcccatggcttctattatctttgtgaaagcaccaaccttctcctcaacaggctgtggggaatctttggtagtagaaagctgattaaccaaaaagaaaaaaactaaaattagttgcaaaaaatttttaatagaatgctttgttcctcatcaggtctgagagcattttttttttaaatacagtcagggtctcctcccctcacccaggctaaagtgaagtggcacaatcatagctcactgcagcctcaaacttctgggctcaagtgatcctcctgcctcagcctcccaagtagctgggattacaggtgcacgccatcacgccaagtcaattttttaaattttctgtggaggtggggtccacagcctgttgttctctggagagggggggtccatagcctattgcctaggctggtctcaaactcttggcctcaagcaatcttcctgcttcagcctccccaaatgctgggattacaggtgtgagccaccatgcttgggctgagggcatttttattgcttagatttttgttttcacctacaatttttaattttcttttttttttcttttttcttttttttttttttttttgagacagagtcttgctctgtcgcccaggctggagtgcagtggcgagatctcggctcactgcaagctccgcctcccgggttcccgccattctcctgcctcagcctcccgagtagctgggacaggcacccaccaccacgcccggctaatttttttgtatttttaatagagatggagtttcaccgtgttagccaggatggtctagatctcctgaccgcatgatctgcccgcctcggcctcccaaagtgctgggattacaggcgtgagccaccgcgcccggcctaattttcatttttttaagcatcttatcattcagtgaaaacacatttggaactgtacctaatagatgccctccaaatttcagagcaagacatgcctacctcattgactgtatgtctattaacccatatctagcagatgacagatgtggggtattagaataaaagttctatcaaaaagaagacttttaaaaggaaatcttgacccccatctcccaagaacaattctgagaagtaaaacattctatgcttattgatgtaataggaaaaggaaaaaaaaatactgcctgaaagcagtcaaaagtcattcaaaactgcaatcaagcactgaatgtttttaaactcttgcattttttagtaaaggtatcacaaattttattaatgactacagagtcttgtagtttgcaaataacctccaaggaaagtctgttctaatgttaaccctctccaagcaaaggcaagctatctaaccaataaaaaattatccaaaagttaaatatcactttatttttaacatgtaaaaaattcatatgttttcctcttaagtgttttccagacacaacaatggaagaaacataggacatagcctcagaaggcttaggtccaaatattcaggctggcatggtggctcacacctataatctcagtaatcccagtactttgggaggccgaggtgggaggatcacctaagcccaggagttcaaggcagtagtgagccatgatcatgccactgcactccaccagggtaacagagcaagacctcatctgttaaaaaaaattttaaaaacaatcccagcacttagggaggctgaggcaggaggatcgcttgaagccaggagtttgagaccaacctaggtaacaaaacgagaccctggtctctacaaaaatttaaaaattggcagtacacagtggtgcatgactgtaagtctcagctattcagaaggctgaggcaggaggatagctcgagcttgggagttcgagactacagtcagctatgaaggcaccactctactctagcctgggtgacagagcaagaccttgtccctgaaaaaaaaaaattcattttgtctgccacttacttaccatccttgtgaccttgggcaagtcactttaccccctgagcctcaccttctgcattcgctaaaactcacctagctaacaattttgttgagatccaaagaacacctgtgtgaaagcactctataaacacagaatgcactgataattctcaccttacgtgtggtgtgatacttcctattcagctgtatgtctattccaggaatctgttctgatccaccacatgctcgggactggctcatctggggccactgaagaataaaaacacagatctatgcaacactgagcacttacagggttaatctgaacagagctgtttcaaagtaaagactataggatctttccaaccttacttagcccacttccccgtgatcagctcaccaggaagacccaagatcagcacctagaagggtgtctagtacatggtagatgcccaagaaatatctgttgaatacctgaagaaataaaagaatttgggccaggcacaatagctcacacctgtaattccaacactttgggaggtcaaggtgagaggattgcttgaggccagagtttaagactcagcctggggaacatagcaagactctatttctacaaatttttttttaattggctgggtgtggtggtgcatgcctatagtcttaagctgcttgggaggctgaggtgggaggatcacttgagcccagaagatcgaggctgcagggagctatcatcacaccactgcacttcaacctgggcgactcagcaagagcaagaccctgtctgtaaaaaaaaaaaaaaagagagagagagagtgaattcaaaggccaggtggcgtggctcacacctgtaatcccagcactttgggaggccgaggtggatggatcacttgaggtcaggagtttgagagcctggccaatatggtgaaaccccatctctactaaaaatacaaaaaattagccaggtgtggtggcacatgcctgtaatcccagttactcaggaggctgaggcaggagaatagcttgaactgaggaggcaaaggttgcagtgaaccaatatcatgccactgcactccagcctgggcaacacagcaagaatcggtctcaaaaaaaaaaaaaaaaaaaaaaaaaaagaattcagccctggaaacctggaactacatctaagtcaattctaggaaacagaactgtagtatctatctatttaaatatgggcagcagtgccgtatatggggaaaaaaataaagacaccagccacttttaggtttaaaacctgcttctgtcgcctacgacaagctcagtggccatggaaaacttactgaacctcagttgcagtaaggatgaaagaaggtaagatatataaagtgcctttcacaaaataggcactcaataaatagcagaagtttccatcatcactatcatcaccagcattattgtttggatcacaatcgccacctttttcatgttcacattgcatttaaaaacaatttggcaataaaatagccgttattatgtgccagatactatacagaatgaaaactgggaggaaagtccattaaggagatggttaatgaaagttcagtcactcagtggaaaatcaggtatccattgagggttttttgttttgtttttgttgttgttgttttgtttttgttttttgagacaaggtctggctctatggcccaggctggagtgcagtggtgcaatctcagctgactgcaacctccacctccccggctcaagcaattctcctgcctcagcctcctgagttgctgggactacaggcatctgtcatcacaccctgctgatttttgtatttttgtagagacagtgtctccatatgttgcccaggctggcctcaaactcctgggctcaagtgagtgatcttcctgccttgaactcccaaaatgccttgaactcccaaaatgggactacaggcatgagcctgggtgcctggctgggatttttttttttttaaatagacttttttttttttttttaacagcagttttaggctcatagcaaaacttcctggaaagggcagagttcccacataccccttcccccacatgcacagcctcccccgccatcaacatcccataccagagtggtgcatttgatacaaagaacaaacctacactgacacatcatcatcactcagactgcacggtttactcagagattattattattgttaacaacatgaaaaatgttaaatgcttataatatgtataaaattataggtaaaacatgactgcgtagactgcatatgggcaagtttagaaagaacacacaagaaaccaaagagttattttgttaagttagaattatggataaatttaagaatctatagccaaaataattctggcaaaaaaaaaaaaatctagtttccaaactctcactaatgctatattacctttacaataaaaaagggtgagagggagcaggaagagggctgactcttcaattctggtttattccaagaagaaatggaacacatggaatgaaaatgattttttttctttaaccctaacgaagaaaaaatagaatttctaattgtggaatgttactatttacttttctttccaaacgaggatattaaaaaattagtcaggattcttctggtcagtcccaaggacacttaggctttaattcataagtatcaagcaggctttgtaaaacacagactaaacacagaacacctccccattacatcacatacatcaatgcaatggtccacctaaaacacaaagcacttaaactggttcaaagaacacagccaacagcagtttccacaagctgtgctttgggctgggtcctcttctattaggttctattagatccttctttttcctcacagctctaggagtaaccagtagattccttctgtggctgtcctaccatctactgtatttctatcctaccattagctaacatttcacactatattgaactactaaagtacctatgtatctagtatcaaggacatctagtttctccacacctacacacttataaacacacacatttacttttttgtactacccactcttgtccttgcacttcccgcaaaaaattcactcgacccttaaagacctcaatttttcctttgcttagattagaaaatatcaataggctgggcgtggtggctgacgcctgtaatcccaacactttgggaggccgaggcgggagggttgcctgagtccaggagttagagaccagcctgggcaacatggcaaaccaccatctctacccccctccaaaaaaaaacaaaaattagccaggcatggtggtgtgtgcctgtaatcccagctactcaggaggctgaggcaggagaatcgtttgaacccagaaggcggaggttacagtgagccaagatcatgccactgcactccagcctgggtgacagagcaaggctctgtctcaaaaaataaaaataaaaaataaaaaaacaagaatgacagaggcagagaagtagaaagggggtgctgggacaaactcaagcgattcttgaataccatgggcgtgtgtgtctgctccttttagcaactataagctccagggcacagcccatcttatatgtctgtcattttctgtcccaatactcaacaccattctgggcatgaagtcattactcaataaaaactaggtggattttttttttttttcaaagaggacaactttggagaacgtccaaaaaaagaaccacaggaatgatcaaagggatgaataaaaggtcctagtggaaaggtcaaaaggaatttaggctgtttagcttggagaaaaggcaactgaagaactaaagagtaactcagaataacaacacttgagctggaagaaatctcagagatattctggtccaaccttttcacttcacagatgaggaaactaagacaaagggagaggttgcaatttggtaaaggtaattttaggacaacttttttttttttttttaagtttcatttcatacagtgaggagaaaactttcccaagcaacaggaacataaatagcaacaaaaatagcaattgcaacttactgaagatctcctgtatgtctagtacctacctacatgcttggtgttttacttatgttatctcacaacaatcttataaagtatattttcctattttttttttttttgagacggagtctcgctgtgcccaggctggaatgcggtggcatgatctcggctcactacaacctccacctcctgggttcaagcaactctcctgcctcagcctcccaaatagctgggattacagacgtgtgccaccacgccagctaatttttttatttttttagtagagacagggtttgaccacattggccaccctggtctcaaactcctgacctcaagtgatcagcccaccttagcctcccaaagtgctggtattacaggcatgagccaccacacctgccccttctatttctttttttctttttttttgagacagggtcttgctctgtcacccaggctggagtacagtggtgtggtcatgggtcactgcaactttgacccccccagactcaagggatcctcctgcctcagcctcctgagtacctgggaacacagagatccagctattccggattttttgtagagatagggtcttgctatgttactcaggctggtctcaaattcctggcctcaaacaatcctcccaccttggcctccagaagtgctgagattacaggcatgagccactgtgcccggactattttttcctgttttagaaattagaacacaaaggctcaaagaagtaaagttcattaaagactaggatatatactcaaagctatgttctgtccgctatatcaagctgccttcaaaagtctgagtagagttcaacaacacaggctcatgcacacttaatacccagatcttgatttctaaatactgctctccaatagaaggaatcggggctgggtgcggtggctcatgcctgtaatcccaatactttgggaggctgaggcgggaggatcacctgaggtcaggagttcaaggctaacctggccaacatggtgaaaccccttctctactaaaaaatataaaaattagctgggcgtggtgtgtgcgcctgtagtccccagctactcgggaggctgaggcaggacagtcacttgaacctgggaggtggaggttgcagtgagccaagatcgcaccactgcactcccacctgggcaacagagtgagactccatctaaaaataaaaaataaaaaaaataaaaaaataaaatcaggactccttggagtaatgtttgaatctagggccagggcaaagaaaatacagcatgaacctgaaacatcttgtggtgccagcaattaagagagtattcaaaaaatgatggggggcatgtagaaaggcgttcccaatagcccaagctgggacaatctaatcaacaaaataactaattggaaaatgaattataagccgggtgcttataatttgcacctctctttgggagaccgaggcgcatagatcacaaggtcaggagatgaaggccatcctggccaacacggtgaaaccccatctctactaaaaatacaaaaattagctgggcgtggtgagctcgcacctgtaatcaagctattcaggaggctgaggcaggagaatcacttgaacccgggaggcggaggttgcagtgagccaagatctcgccactgcactccagcctgagtgagagagtgagactccgtctcaaaaaaaaaagaaaagaaaagaaaagaaaatgaattataactcagaagaaaataaatatccatgagctcatactggtataaataaataattgaataaataaataaatggggaagaagtgacagctctttcttacaacagagttccagttaataaatgtaggaatgatggaaataaaaaatcattagacaaacaccacaataatgatcactgcagtgaagaaccatcaatgcaattatcatataatccatcaatcctaattctgggtatatatccaaaagaattcaaagcaggatctctaagatatttgtacactgacattcactgcagcattattcacaataatgtgtgcaagagacagaaggaacccaaatgtccattgatccaaatggataaagaaaatatacaatagaagagtacgcagccttaaaaaaagaaggaaatcctgtcatgtgctacaacatagatgaaccttgaggacattatgctaagtgaaataagcatgtgccagttataaaagaacaaaaactgtatgagtccactcacatgaagtatcctaaagtagtcaaaatcacagaaacaaggccagggtgatggctcatgcctgtaatcccagtgctttgggaggctgaggcgggcagatcactcgaggtcaggagtttgagaccagcctggccaacacagtgaaaccccgtctctactaaaaatacaaaaattagccaggcgtggtggtgagcacctgtaatcccagctactcaggaggctgaggcagaaatgcttgaacctgggaggcggaggttgcagtgagctgagattgcaccactgcattccagcctgggcgacagagtgaaactccgtctcaaaaaaaaaaaaaaaaatcatagaaacagaaagtagaaaagcagggtggggagagaattagtgtttagcatagagttttgcaagatgaaaaagtttatagagatctgttgcaaaacaatgtgaatatgcttaaattaacattactgaactgtacacttataatggttatgacaataaatttaatgttaacatatcattaaaaaaaaccaccaatgactgctaaaattagtaagcaaaagtataatgtgaaatgggtatctgcacagtctccaagtatctcctgacaagatactaattacaaagggaaaatactaactttagagttcaggaacctgacaaacaccaatttaaccaagtggccaaagttataagacctactagcattatgtatcccctgatatgatgcactgagaagggaataacatcatttttgccaaaaatgcataacctcaatctcattataagaaaatattagaaaggccgggctttctatattataggtggtagctcacacctataatcccagcactttgagaggtcgaggtgggcggatcacctcggatcaggagttcaagaccagcctggccaacgtggcaaaaccccttctctactaaaaatacaaaaagtagctgggtgtggtggcgggcacctgcaatcccagttactggggaggctgaggcaagacaatcacttgaacaggaggcagaggttgcagtgagccaagatcgcaccactgcactctagcatgggtgacagagcaagactctgtctcaaaaaaatgaataaaaaataaaagaaaataaagaaaaaagaaaagaaaatattacacaaactcaaattgagaaacattctacaaataactgactagtactcttcaaaagtgtctaaatcttgagaagaaaaagaataagaaaatgtgaccagacacagtggctcatacctatattcccagcacttggggaggcccacaggggtggatcacttgaggtcaggagtttgagaccagcctgttcaccaaatggtgaaaccccgtctctactaaaaatacaaaaatcagccaggtgtcatggcacatacttgtaatcccagctacttgggaggctgaggtgggaggatcgcttgaacccaggaggtggaggttgcagtgagcaagatagtgccactgccaagatagtgtcatccaccctggacgacagagtgggactctgtcttaaaaaaaaaaaaatgaaaatttaacagattggagacgactaagaatatatgacaactggatttgttatcgcagatcaaaaaaggacattcataaaaaaaaaaattgacaaaattggaacaaatagactaattaatagtattatttcaatgttaatttcctggtttcagtaattgcaccatggttatgtaagaggttaacattaggggaagccagatgaaggctatttgggaatgctactacttttacaactcttacataagtctaaaattatttcaaaatttaaaaaatatttttaagtagacagaacttcaagaggctaattaagacaaagctgaaagtatgtctctagctctttgaaaacaataataggattacagcactggacattaccttacagatacctgatactaccactcatcgaaggaaggattcctttatgtcaggcccttgacatacattcatcctaccactgcctgaatatttccagtaagagtaaatttactatgtgaaaacgcagctcacacatcccattatgcacaattctaattaacaaaactctttctcattctgagccaaatcttcctccctgtgagacatgtacctgaggatgccattctgaagcagaagtttccaaccaggggacctcaaagataggaagatactccagtaagttacagtcgatacgacaaaaggtccagttgatttacaatgactaaaattacatctggtcagcatgagataaaccaccctcagttatttacataaatgctttgctataatgttgtcccagagcctaatacagtacccggtacttattaggtgctcaagaaacgtttactgacccaaagagtagggcacaagtcagagattcatataatgagttattttcccctaccatctacacacatacaaataacaaatactattaaaaatttgtacaaaaagtaacagaacacagcccaagctctgaaaagaaatacctgcataactacccaaagtagacgcctcttctgcacaggcatattctccattcattcaacatatacttagtgactactctgtgccaggcatagtgaaaagaccaggaaatacaagaaaaaagcaagatgtcctcagaagggcagggcttacacattaattggagggaatttttaagtagattatatatgttacataaattatataatatatataattacatatagcaaacatatttttaattgcatcgaatacgaaaaagaaagttaatgactacagataaaaatcataaattggtaagaaaaatgagttcccaatagatgaatggagaaatgccataagcatacaattttcacaaactgaaaaacaactgatcaatacagaaaaaatacataaccctgagagctaaacaaagaaatacaaggtaaaacaaggtaacatttcttacccaatttatttaagttaaaaaaaactcaacttgagagaggtaataatgaaaaactacttatacatacattgctggtggcagcataaattaaaacaaccttttgaagaggcaaactgttcatactctgacccaaggtatgccttcctaggaattattaataagtaattaaaagtaagaaaaaatatgtgctaagacaatggtaagaaaattaaagcttataatggcaaaaaaaaggaaatgattttcatatcaaaggctaagtaaataaaatattatatggtcattaaatttttaattacaaagtctatcaaaacaatatgaataatgtccactctaataagtgaaaaggtaccagaatataaacttctgtggacatttgttagggtacttcaggaataacattacatatacatacacacacacacacacacaaacacacacaaacacacacacacacacacacacacacacacaggctgaaaaagaaccagcagagataaaatactgacgttttcagatttgaagtcatagatgatttatttcccttattactaaattatttgtattattaacaaaaatcaggagggacacaaggtccaaggtaaactacattataatgattaggtggtcaatggtaaatgaatacctcaaataattgtttcttggattttatattcatataaaggaaaaagaaataattatcacgcccaaataaaagtagcacaagatggccacaaaaagaaaattgaaaaaggttaactcggagatgaatatctggaaaaattccctaacagtaaaaatcatcagactgtagcatggtatcctaggctaagttccactgctagggtatttagaagcaacgccctagacaccatactttaggaatcagtcctaagttggcaccacagagacccagagtggtctcatgaggtttttccatcacacaatttggttggctaatctataaatacatgacatttgcacataaacactaaggttttcatactaagcaaaagaacaacaaatcttacctgggaagtgcgagacagagccctgtccccctgtccttgggtaggagacacaggtatcaatcggctgcatactggaacccactgagaaatgctagtctggttcctctaaagaaagaaaataataatctgtcaggaatctaaatcatactccctacatggaaggcaaagagtgtacctgtgatactgtaatataattagaaatatatatttggccttcatctctagttcctggcacagagctcctaaaacccttggaatttctgagtgaggggggtgtctgtaactcataataagcccctttcaaccatacctgagtttatgctaatgaggtgattcatgcaggatggaggctggttgccagagaaacctaccacaggagtagagggttggaactcagccccaactcctcaaggcatccccacctccaggagaggagagggattagagactgagccaatcactggtacccagtgatttaatcaatcatgccaacaataagcctccacaaaaattctaaatgacagagttcagagaacttccggtaaagatgaaaaactcttttttctatactcaacactccacttctgataccaaatgtgcaggggcaaggggtctccataccaagcaattctctagttctctgcagacaccaactgggtgtcctacaatttaacttaattcttaaactaactgcctggagttagcagagacctcacagcaccatccaacaggactgtcccccacttcagactcccatcacaagtagtgggtccccaggttactcacacttttgtccaacttgtccatacattgggggttcccacagctgcctcctcagattcaataatttgctagcatggctcaactcggggaggcacttcacttacttttatcagtttattataagggatacacctcaggaacagccaaatggaagcgatgcaaaagacagggtacggggtgggagcttgctctccgggtgtgccaccctccctacactttgatgtgtttactaacctagaagctctccaaacccagggatttctatggaggcttcattacgtagacatgattgattatcactgatcactggtgatcagctcaatctccagcccctctccccttccaaaagtcagggaggagtgggagaagctacaagttccaaccttctacacacatatttgttcctctagcaaccagcctctaccctccaagagtcaccttattaacataaactcactgccggtcatagcagctcatgccttcactcctattatctcagcacttttgagaggctgaagcaggattacttgaagccaggaggtcgaaaccagcctgggcaacaaagcgagacccccagctatacaaaaaaaaacccataaactcatgtatggttgaaaggggcttattataaataaataaaaaaaaaaccattcctctcaccccaatcactctgcaagggtttcaagagctctgtgccaggaaccagggataaagaccaaatatatatttcttctctcacaatatcatatctgggttgcagccacaggccaggagggtggcacactctaattccacagggacagaagcaactacactcaggaccattccagatctggcctttagtacctaagtttaaaaatcctgccagaatggggtatcacatgaatgaagaacttccaaaatgggaccaagaccaagcctccacatgctcatttctccaaggataagataaaccactgcctactactgattccacagactaaaataattctggtaataggtgactcaagcagtgggcacgggctccctctgggaagagaaacaaaataagcagacttctggcattttatgattagattataattcaaattacggtttgcaatgtcttttttttttttttttttttttgaggctgagtctcgctctgtcacccaggctggaatgcagggccatgatcccagctcattgcaatttccacctcctgggttcaagcgattcttacgcctcagactcccaagtggctgggactacaggcatgagccaccacatagggctaatttctgtatttttagtagagacagggtttcaccatgttgaccaggctggtcttaaactgctgaccttaagtgatctacctacctcggactcccaaaatgctgggattacagatgtgagccactgtgcctggcctttttttttttttttttttttttaagagacagggtctcactacattccccaggctggagtccagtgcctagtcatggtgctaacattgcacactacagcctcaaatgcctgatgcctgggctcaagtgatcctcccacctcagcctcccaagtagctgggactaaaggcttgcatagctgtgcctggcttacaatgtgttttcataaacactgacttacttacctgatcttcatagaatccctttatagtaagcaatgctgagatcatcatcatccccaaaaggaggaggaaactagggtagaagttttgcagtgggaaaacacacgtgggcaacttgatttccaagacaagagagattaaatggctgttcaagctaaaactgagattcacgttttccctctaacatgaagctcacttcagaaaggtctcttggccaaagtgagaggctaggctggagaaagggatagctctctcttgctaaataagaagtctgctttattttatgaacctgaaatacattccactgtataaatgatagccatgtacacagcactggaaatcttaattttaggaaccaactctagggatctgagggttttcttcacttgacctgtagaccttatagggccataatgaggaccagatacataaattgcttgaaaatcctttgccaagcataatgtataacacagtcagccctccacagccatgggttctgcatccatggattcagccacccacagattaaaatattcaggaaaaaaataccgggcatggtggcgtgtacctgtagtcccagctactctggaggctgaggcacgagaatcacttgaacccaggaggcaaaggttgcaagtgagcagagattgtgccactgcactccagcctgggcgatagagagggagactctgtctcaaaaaaaaaagaaaaaaaaaaaaagaaaaatcaggccgggcgcggtagctcacatctgtaatcccagcactttgggaggccgaggctggcggatcacgaggtcaggagatcgagaccatcgtggctaacacagtgaaaccccttctctactaaaaatacaaaaaaattagccaggcgtggtggtgggcgcctgtaatcccagctactcaggaggctgaggtaggagaatggcatgaacccgggaggcggagctggcagtgagccaagatcacgccactgcactccagcctgggtgacagagcgagactgtctcaaaaaaaaaaaaaaagaaaaaagaaaaaaaaatcaggaaaaaaacatgccatactaaacatgtagactttttttttctcgtcactactccctaaataatacagtataacaactatttacatagcacctatattgtattaaatgtaagtaatctagagattatttaaagtacatgggggaatatatataggttatatgcaaatactatgccactttgtatcaaggacttgagcatccacggattttgctatccgagggaggtcctggaaccaaaggaccagggatacttggggacaattgtactaggagtcaaagattctagtttaaattcagctactctaacattatctttacaagtaatttaacctctgtgacattcagtttcctgatagcaattatgaggaacacttaatgagcatttgatggcaggcacttttctggtactttacatatatgaactcatttaaacttcacaatcaccactcatgtaggtatatcattatcccatttacacaaaaaaggaaactgaggcatggagaggataagcaacctcccaatgtcacatagttctaacagcaggattaagatatgaacccagacaacccaactctagaatccttgctcatttatgggatgaaagggtagagtatctgcaaggtaccttctagctctaacactatatgacctggtctggaaccaattaaaacagcatattgtggaaagtgccacataactaaaggcaggaagtactgttcagaagctacatattagataatcacctctgtgagccttggttgtctctttttatcaaaaataaagacaaaatccccacttctcaggattttctttaaaattaacaaatgtaccttgcagtatgttcagcacaatattaagttgaatctgaatctccatttcctcgagtagaaacaggttgaggtggggtggagaaaggcattaaatttttaaacctacagatgctttctaaagtgtctcacagttctaaaattgtataattgccacttacagcaccttaaatttcaaatgaaaagtggagctaaaaatattttatttgagctgtggttggatcagttgaaatggttttccaagtgagagacagttactggtgttttgttttacaaacactgacagatttaccagaaacattcaatgtcagatgttcctgtactaaaaatgttaactatgggataagaggaaactgcttcagattcagggccaaaggtggggggggggggggggcggtgcagggggagcaagaggaaattacaagttgaaacaatgcaaacttttggaagattttctgaagaatttcatcatgtaatttccaatgtcaacaaaacttttctctgtaattttggctccggttggtcttaggccaatacttttaaatcagttcttattagaagaaaggaacaatcagctgttctttccttcgccaatcctacaacaattcttgtccaaatccttaattgaaaccactgaagtgtaacagaaagggtaatcccaagtctgccatcaaatagctgtgaactggttactcaacaatctgggcctccattttcccttatgaaaaatgggaataataaaagctatctcacaggagtgttcccaggaacattcctaaaagcactttgataacagaaaaacacaactaaaggcatcactgttatgaacaactgttaccgaattatacaagccctgctttccccagcaaactgccagagaagcaaaaactgttttcttaaaatattgtttggaatctggcatttattccctttctcaaaagcttgcagtggtttccaaggacctctttattgaaacttaaacacctggtccttactggtctttaccaactggacccctctaaactcataatacttactgtgttttccactcaacagtttcaacacctgactcagattctctggtttgggaatcactgcttcactccacacatgctaatttccttgtagtaattttttgggactctcctcttcactccaacccaaactataagctcaattgcttcaagaaatctctctaggccgggcgcagtggctcacatctgtaatcccagcactttgggagaccataggcgggcagatcacctgaggtcaggagttcgagaccagcctggccaacatggcaaaaccccatctctactaaaaatacaaaaattagccgggcgtggtggcaggtgcctgtaatcccagctactcgggaggctgaggcatggagaatcgcttgaactggggagacagagattacagtgagccaaaatcaggccactgcactccagcctgcgtgacagagcaagactccactcaaaaaaaaaaaaaaagaaaagaaatctgtctagatgtcagcttctggttctactggctctactcagtccttttttttttttttttttgagatggagtcttactctgtcacccaggctggagtgcagtggcgcaatctcggctcaccgcaaccttcacctcctggattcaagcaattctcctgcctcagcctgccgagtagctgggactagagcggcgcgctaccacgcccagctaatttttgtattttcggtagaggcggggtttcaccatgttggccaggctggtctcaaactcctgatctcaggtgatccaccggcctcggcttcccaaagtgctgggattacaggcatgagccaccgtgtcgacctctactcgtcctttttcctttccacctcttccaccacttcatctataaatataaatctgtggaagtacttatctctctcttaaggtactaatatattaggcctataacaattagcacatctcaacttctcccaagttcaaaagacattcatagccactcccaatggcaaaaattattcctttaacttaagataaatgcactgttactaagtgagaactagttttattgccattttgcctttccaacacttcaaaaccaaaaaaaaaatttttttcttttttttttttttgagacggagtctcgctccgttgcccaggctggagtgcagtggtgggatctcagctcactgcaagctccgcctcccaggttcacgccattctcctgcctcagcctcccaagtagctgggactacaggcgcccgccacctcgcctggctaattttttgtatttttagtagagatggggtttcaccatgttcgccaggatggtcttgatctcctgaccttgtgatccgcccgcctcggcctcccaaagtgctgggattacaggtgtgagccaccatgcctggccaaaaccaaaatttttaagataggcttcatgttttcgtttcccgtgcacattgttaattgcagtgatttttacatcagtatttcaaaacattctgacataccacctcttgtactgactaccctttaatcagtccactgacaggcctgtttctgcatgtggttttttaagatacatagtattttccttggctcattcatgagctagaaaacaatttacaggtgtagcggattctagttattcaccataaaatcaccacaaacactgagttagcaaatactgaaccattgcttctaaaggaaatgccagacttaggttcctggaagcctctggtcacaacattcatcaaccaatcaatatataaccttgttttattggtttctgttgaaagacaccctatttaatatacattgttgattcattaacacggaactcacagccaacagcactataactcacttagcaaaatttacctaacaaacatattttcccataaggcacattgtggccttctcgcactcagcaatgctagatagcgtttccatactacacttgggtgacattttaaagatgggattcaccaacaaaagcacaaaaatacgaaaaatatggcactaaacaggccatgaaaagaatacttgttacagtatgaaaactgaaacaagaaggcggaatgttgacccatctcagccaggaacacacacattggcagctcaaatttcttacccctctgcaaatgtccacaagtgactacaaaagtgctgcaagtattgattttggggtttcaaataaattttagcaactaggtgagttcacaaatatagaatctgtgaataacgaaaatcaattataaacatgaaatccaccttttttttttttttttttttgagacagagtttcactcttgttgcccagactggagtgcaatgacgcaatctcagctcaccgcaacctctgcctcctgggttcaagtgattctcctgcctcagcctcccgagcagctgggattacaggtatgcgccaccacgcccagctaattttgtatttttagtagagacggggtttctccatgttggtcaggctggtctcgaactcccaacctcaggtgatccctcagcctcagcctcccaaagtgctgggattacaggcatgagccaccatgcccagccgaaatccactttataagtcaccactggtgcctatattccaaatgccatggatactaactcaattccggagtccaaagaacagatactacggtaacaaactttccttccagttacaatgtggcatgctataatacaaaaggatatttccacagagggaagaagagaatgtttaaccattccttcaaaaattactgaatacaggccgggcatagtggctcacgcctgtaatcccaacactttgtgaggctgaggtgggtggatcacttgaggtcaggagttcgagaccagcctggccaacacagtgaaacccgtctgtactaaaaaatacataatataggccgggcgcggtggcttacgcctgtaatcccagcactctgggaggccgaggcaggcagatcacgaggtcaggagattgaaaccatcctggctaacatggtgaaaccccgtctctactaaaaatacaaaaaattagccgggtgtggtggtgggcgcctgtagtcccagctactcgggaggctgaggcaggagaatggcgtgaacctgggaggcggagcttgcagtgagctgagatcgcaccactgcactctagcctgggcgacagagcgagactccatctcaaaaaacaaacaaacaaacaaacaaacaaacaaacaaaatatatatatatatataatatatataaattagccgggcatggtggcgcatgctggtaatcccagctactcaggaggctgaggcacaaggatcgcttgaacccgggaggcggaggttgcagtaggcagagatcatgctgctgtactccagcctgggtgacagagtgagaccccatctcaaacaataacaaaaaattactccagtactttgggaggccgaggcaggcggactgcctgagctcaggagtttgcaaccagcctgggcaacacagtgaaaccccatctctactaaaatacaaaaaaattagctgggcatgagggcatgcacctgcagtcccagctacttgggaggctgaggcaggagaattgcttgaacccgggaggcggaggttgcagtgacctgagatcgcgccattgcactccagcctaggggacaagagcgagacttcgtctcaaaaaaaaaaaaaaaaattacctatacactgcctcctcccacttttttgggagttttcaatctgagctttcaaaagattgattacatacaggaaagatttgaataaatcaataaatacattaagggtgaggggtcaggtttctatcagagaaaggagttaacaaatatggcaaggcaaaagagtagaacaaaccctgtggtattagaatagattagaataactggtgtgggcttttaatatataaagaaaaagatatatgcatgtttatgtgtatatatagacatatatatatttcctacccacgtcctggtagggcctgcagatgacactccagtagcaataagcacatgtagcacccagatgtggtttctaaatagcaacaaccactaaaggaactagtctcctcaggagacaagttgactccagaatggggatgatgttcatcaaagccttacaaagaactggcattattcccagacatcccattactgggtatatgcccgaaggattataaatcatgctgctataaagacacacacacacgtatgtttactgaggcactattcacaatagcaaagacttggaaccaacccaaatgcccaacaatgatagactggattaagaaaatgtggcacatatacaccatggaatactatgcagccataaaaaaggatgagttcatatcctttgtagggacatggatgaagctggaaaccatcattctcagcaaactatcacaaggacagaaaaccaaacactgcatgttctcactcagaggtgggaattgaacaatgagaacacttggacacaggaaggggaacatcacacaccagggcctgtcgtggggtggggggagcggggagggatagcattaagagatatacctaggccgggcgtggtggctcatgcctgtaatccaagcactttgggaggccgaggagggcggatcacaaggtcaggagatcgagaccatcctggctaacatggtgaaaccccatctctactaaaaatacaaaaaattagccaggcgtggccgggcgcagtggctcacgcttgtaatcccagcactttgggaagccgaggcgggcggatcacgaggtcaggagatcgagaccacggtgaaatgccgtctctactaaaaatacaaaaaattagccaggcgtggtggcgggtgcctgtagtcccagctactcggagaggctgaggcaggagaatggcgtgaacccaggaggcggagtttgcagtgagccgagattgcaccactgcactccagcctgggtgacagagcgagactccgtctcaaaaaaaaaaaaaaaacaaaattagccgggcatggtggcaggcgcctgtagtcccagctactcgggaggctgaggcaggagaatggcgtgaacccgggaggtggagcttgcagtgagctgagattgcgccagtgcactccagcctgggtgacaaagcaagactccatctcaaaaaaaaaagagatatacctaatgtaaatgatgagttaatgggtgcagcacaccatcatggcacatgtatacatatgtaacaaacctgcacgttgtgcacatgtaccctagaacttaaagtataaaaaaaaaagaagcttgactctgaaaaaaaaaaaaaaaaagaactggcattattcaacctgtctgacagttccttagaaggccctatttcaaggctgtcttagaactcacccagtgtgaaaaaaccttttccccaggagcaccggttgaaaacaaatagaggtaactgtttgacttcatggcttcctgaggcagtgattaacaggtggagaaaacaacaggctaaccaaaaaggtttaaaggaaaagctggggaataagatgtccacagaggcttagaaaagccccaatatattcctgggcatctaggaagccatgaacatacccaggtctgtgcatatacccaaagctgtgcacatgctcaggaaagacctaagaatgtctcttacttgtggttgaccttgaggttctgcatagcaggaagtgaaagttaaggcagagttatcgaatgcctggcagagtgttataggtacatcccaacgtgcacacagagccccaaagcaaaaactgggatactcactgcttccaggcagtgagaacagaattttaagaaatttaacagaaatttaaagaaatttgtttaatcattacctgaccactaagctatctaagcagagacttcagtagccacaaacaacaaagaatacagactacagaatcaattcagaaaagtcactaaacaaaaatacaacagcaaaccctgggaagggaaacaatctgatttccggagtggccacattatttaaaatgtccagttttcaacaacaaaaagttataaaacatgcaaagaaacaataaagtatggcccatacacagggggaaaaaatgcaatcaatagaaactgtctctaagaaaacccaggcagcagacaaagagatttttaactatttcaaatatgttcaaagatctaaatgaaaatatgtctaaagaactataagaaagtggccgggtgcggtggcttacacctgtaatcccagcactttgggaggccaaggcagggggatcacctgaggtcaggagtttgagaccatcctggccaacatggtgaaaccccatctctactaaaaatacaaaaattagccgggcgtggtggcaggcacctgtaatcccagctactcagaaggctgaggcgggagaatcgcttgaacccgggaggtggaggttgcagtgagccaagatggcaccaaagagaatatcaacagaaagagaagttatttttttaaagacaaaataaattctagaattgaaaagtccaacaactaaaatgaaaaactcattagagggactgaacagcagatttgaacaggcagaagaaaataatcagtggtcttgaagataggtcaatttagatcatccagtccaaggaacagaaagaaaaagcaataaagacaaattagtagcctcaaaatgaaaagcaaaaacaaaaaaagaaaaaaaagaacaaatttaacagcctcagactgtgggacaccatcaaacacaccaatatatgtataattagagtctcagaaggaaagaaaaggaccgaaaaatatttgaagaaataatggcagaaaacatcccaaacataatggaaaatggtaatttaggaatccaagaagctctactaactccaaataggataaacacaaagagagccacagacacatcatatgcaagctgccaagagacaaagattctttaaatgagcaagagaagaaactcatcatatacaaagtatcctcaagaacattaacagtggatttcttctcagaaactgtagcagccagaaggcagtgggataaaatagtcaaaacaaggaaagacaaagattttcaaacaagaattctatatccagcaaaactattattcaaaagtgaaggaaaaaatgaagatttcccagataaacaaaatggaaagaatttgtcagtagtagacttgccctgcaagaataaggcagaccttcaggttgaaatgaaaggaaactacagaataactcaaatctacatgaagaaataaagtagactggtaaaggtaactgtttaggtaaataaaaaatacagtacaaatggattttttgtttgtaattctttttctttttaatttaaaagacaactacaagaagaaataattataaatctacattggtagacatataatgcataaagatgtaatttagatgacaataacacaatgttcgggaaggaacagagctatatagaaagaaagtctttacatattactgaaatgaagttcgtattaatccaaacaagactgttatgaattaagatgttcattgtaatcccagggcagccactaagaaaacagctcataaaatatagtaaaagcttgtaacatgtacacaaattagctcaaaatggataaaagaccaaaatgtaggacctaaaatgatacaactttcaaaagaaaacttacgggaatggcttcatgacattggattttgcaatgatttcttggacatgatatcaaaaaagtaggcaataggccaggcatggtggctcacacctgtaaccccagcactctgggaggctgaggtgggcggatcacttgaggccaggagtttgagaccagcctggccaacatgggaaaaccccctctctattaaaaacataaaaattagccaggtgtgctggtgcatgactgtaatcccagctacttgggagggtgaggcaggagaattgcttgaacctgggaggcaggggctgcagtgagtctagattgtgccactgcactctagcctgggtgacagtgcaagaccctgtcaaaaaaaaaagagtgggcaataaaagaaaaaaaaataagttggacttcatgaaaatttaaaacttttgtgtatcaaagaatagtatcaacagactgaaacagcaacccataggataggaaaaatacatgcaaatcatatatctgatgagggattgatattcaaaatatatgaaaaacttgccagatgcagtggctcatgcctgtaatccttgcacttcgggaggccaaggcgggtggatcacctgaggtcaggagttcaagacccgcctggccaacatagcaaaaccccatctctactaaaaatacaaaatttaaggctgggcgtggtggctcacgcctgtaatcccaggattttgggaggccgaggcaggcggatcacctgaggttgggagtttgagaccatcctgaccaacatggggaaaccccatctctactaaaaatacaaaattagccaggtgtggtggtgcaggtctctaatcccagctacttgggaggctgaggcgggagaatcacttgaactcaggaggcagaggttgcggtgagccgagatcatgccattgcactccagcctgggcaacacgcgtgaaactctgtctcaaaaagaaaaaagacatgaagaagtgcccaatatcactagtcactagagaaatgtaaatcaataatacaatgagacaccatttcatactcattagaatggcaattgtcaaaaaacagaatataaggccacgtgtggtggttcacacctgtaatcctaacacttcgagaggctgaggcaggagtatcacttaaactcaggaatttgagaccagcctgggcaacatagcaagaactcctctctactaaaaatttaaaaactagctgggtgtgttggcacacacctgtagtcccagctactcgggaggctaagatgagaggattacttgagcccagaagtggaggctgcagtaagctgtcattgggccactgcactccagcctgcatgacacagcaagaccttgtctcaaaaacaaacaaacaaaaaccagaaaataacaagtgttggcaaggatgtggtgaaactggaacccttgtgcactgctagtgagaatgtaaaacagtgtatctgctgtggaaaacagtaggacaattcctcaacaaattaaacaggctggacatagtggctcacgcctgtagtcccagcactttgggagaccgagacaatggattgcttgagcccaggagttcaaggccagcctgggcaacataaggagaccccatctctacaaaaaagaaaaaaaaaagtagccaggcgtggtggcacatgcctgtggtcccagctactcaggaggctgaagtgggaggatcacttgagcccaggaggtcaaggctgcagtgagctatgattgagccactacacttcagcacgcatgacagagcgagaccctatctccaaaaaaaaaaaaagagaaaattctgacacatgctacaacatggatgaatcttgaggacattacgctaaatgaaataagccagtcacaaaaggtcaaatactgtatgattccacttatatgaggtacacaaagtagttaaactcacggagacagaaagtagaatggtggctgccaggggctggggagaaaagactatagagagttattaataggttcagagtttcagttttataaaatgaaaataattctgtggataagggtggtaaagatggcacaacaatgtaaatgcactcaataccacagaactgtacacttaaaaagtttcaaaggtggccaagcacagtggctcatgcctgtaatcccagcactttgggaggccaaggcgggcagatcacctgaggtcaggaattcaagatcagcctggctaaaatggtgaaaccccatttctactaaaaatacaaaaaattagctgaacgtagtggcacgtgcctgtaatcccagctactcaggaggctgaggcaggagaatcgcttgaacccgggaggcagaggttgcagtgagccaagatcacgccattgcactccagcttgcgcaacaagagcaaaactccgtctcagaaaaaaaaaaaaaagtttaaaaggtaaattttgttacatgtattttaccacaacttttttttaattttctaaagtacagggtggctttctgcaatttttactatttccaaagaaaagcagaaatgatcagcaatgcccaggacaactcataaaaaccataagcatgtccagttccactgatcaaatgtccaggctctctgctgtagtcattcaacaatagcagtgttttagtttcctcctccttcccaaaaccatcactggagaagggaaaatattggctgacaagacaaaaagaggaaaaaataaagcaagactaacaagaatgtttcaggaatacttctttttttttttcagacagagtttcactctttcacccaggctggactgcagtggcacaatctcagctcactgcaacctccgcctcctgggttgaagcaattctcgtgtctcagcctcacgagtagctgggattacaggcgcccaccaccaggcctggctaatttttgtatttttagtagagacagggtttcaccacgttggccaggctggtcttgaactcctggcctcaagtgatccacctacctcagcctcccaatgtgctgggattacaggtgtgagccacggcacctggccaggaatacctctctgtggttcagttttcttatctgtaaaatagaggaaataacacgccctcctttccaaagggatgttataaggattaggtaagtattttaaagtgcttagcacgtagtaagtgccctataaaatgatagttgtcaggccaggctcggtggctcatgcctgttatcccagcactttgggaggccgcaggaggcggatcatgaggtcaggagttcgagaccagtctggccaacatggtgaaactccatctctactaaaaatacaaaagttagccaggtgtggtggcaggcgcctgtaatcccagctacttgggaggctgaagcaggagaactgcttgaacccaggaggcagaggttgcagtgagccgagatcacaccgctgaactccaccctgggtgacagagcgagactccatctcaaaaaaaaaaaaaatacaaaaattagtcaggtgtggtgtggtgcatgcctgtcatcccagctactcgggaggctggcacaggagaattgcttgaacccgggagcagaagttgcagtgagcccgagatggcaccactgcactccagcttcggcgacagagcaagactctgcctcaaaaaaaaaaaaaaaaaaaacaaaaccctaaagggtggcaggggaaggattaaaaaaaaaaaaaaaaaaaaaaccactaaattcagaacattctaattgccatttccccagcagtcctcatttctgaatcaatttctggcctgaaatcaaacaatcacttcaccaggtgaatctttctggcagttacaggggctactctacaaataaatatttactgaacagcagtcgagggtacctcactctgctaggctggcaaggaatacaagaagtaaaactgtcgtccttgtaagacatatataaaaagatcaaaaacacaaatgtaaaataacaattcagaagttacctagacacaggaatagaccatgtctactatgaaaaacagtgtctttgacccagtttttgaagactcgctaaaactatacactctcccatccctccatgattaaaaactaagctctgtatcctaacgttttttctgctgccactttcttttctcctttaattgctagagaaaagagtatgctagaagggtcaggactaaatctcaagaggtgcagtagtttcacacacgggtgctaaagagtctggtagtctttccttacttcattcatttattcaacaagtaatcatttaacacctatgatgtgccagacaccatgctaggcaaagtgaaaacgacggagacagacatgactccaattctcacgcagctttcaatctaataatctatattccacttaactgtacagttaagaactgacttattacctatgaaagaaaccctgagaatctcagaatctaaagggactgcaggagataaatgtcctcgtttttcacatagggtcaatgaggcccaaaagtgacttgcttaaagtcactatgcatcagtgacagtcagggactagaacccaggcctcctgaaactccaatcagtgtcctacatgctcctctccctgaggggaagcaggtacatgggggagggaaggaaaagtaaaccccatcaaataaaggccagatgtcagtcttccccttctcgaaagatgggggagctaaggtcaaaacggggtaggaagaggtcggaagctgcctcagtttccccacggaaaagcggccactcagcctagctataacacaggcttccctcctgcgattccttccaattcctcccgccctgccttgtcgaactccaacccgggacccagagagctaccgtagaaaattactccttcactcacaaggactcgcaccagcaacgccatgttcctcaataaccatttccgggtgaagagtgagtttccggtgtccccttttctacgtcctccttttgccggcgaaagactggcaaggggggcgcaggcgcaaagaggtcgctacgcgcacgcgctgttgttttctcggctgtgcaccaggctgtcgtgcccgggcacgctctccctgctgtctcccccactacacgtaacagtggttcaaatccttcccccacgcctgtctccttgaccccagacctcggggcttctcatatccctctctttattccccacctaacccagcctcactcctcagcccctccttcccaaactccaccccaacacttttcaatggaggttgaaaagaacaggactttaggaaatcccaatctttagaaagagccagaagaccgggcgcggtggctcacgcctgtaatcccagcactttgggaggccgaggcgggcggatcacctgagatcaggagttcgagactagcctggccaacatggcaaaaccccgtccctaactaaaaatacaaagaaagtagccgggcatgttggtgtgtgcctgtaatcccagctactctgaaggcagaggttgcagtgagccgagatcgcgccactgcactccagcctgggcgacagagcaggactggactctgtctcaaaaaaaaaaaaaaaaaaaaaaaaaaaaaagccagagaaggaggctaagataaaagaatacgggggataccagactcctgaaagtcaaggcaagaaggcggtcatgtgccgatctgaagcctggtagaggaagaaacttttgggatttgtggttggttggttgtttaagggaaacatctttgcatattgataggaaaagattagtgaagagtatacagggccgtgcccggtggctcatgcctgtaatcccaacactttgggaggccgaggcaggtggattgcctgaggtcaggagttcaagaccagcctgaccaatatggtgaaaccccgtctctactgaaaatacgaaaaaaattagccgggcatggtggcgtgtgcctgtaatcccagctacttgggaggctgaggcagggaatcgcttgaacccgggaggcagaggttgcagtgagctgagactggggcactgaactccagcctgggtgacaaagcgagactccgtctcaaaaaaaaaaaaaaaaaaagagtatacaggagaatcaatcaaagaggcaaggagcttcttgaggaaagtggcagagaacggccttggtagaagactcctcttccattacatcccaagagaagagaagacaaagtactggtgctttgggggttgagggagcagaggggcaggatgttgaaggacttctttcatttcattcagtcaacaaagacctattgagtcttccctatgtgctgaacacaagacatactggcttcatggagttcttagactggtgggggaggcataggaacccagtgaaaaaaattaaaactggggagctactttggttaggttggtaaggcctctccaagaaagtgacatgtaagatgaaatctaaaggaagaagaggagctagtcatgggaaataacttcactcgactatttttttaattaaatttattgatttttattaattgacaaaaaatatatattgtgtacaacaggatgttttcttttttctttttttttttttttttgagacagagtttcactcttgtcgcccaggctggagtgcagtggctcaatctcggctcactgcaacctccacctcccaagtcaagcgattctcctgcctcagactcccaagtagctgggattacagatgcgcaccaccacgcctggctaatttttgtgttttcagtagagacggggttttgccatttcggctaggacggtctcaaactcctaacctcaggtgatccacccacatcggcctccgaaagtgctgggattacaagagtgagccaccgtgcccccggccaggatgttttaaaatatgtatacattgtgaaatggctaagtcaagctaattaatatatgcattacctcatatttttgtgctggaaatgtttaaaatatgttctttaagcaattttcaagaatacaatacatattcatagtgggtatagtcaccatgttatacaatagatcttttctttttttttttgagacggagtttcactcttgttgcccaggctggagcgcaatggcgtgatcttggctcactgcaacctctgcctcccgggttcaagtgattctcctgcctcagcctcctgagtagctgggattacaggcatgcgccaccacgcccagctaatattatattttagtagagacggggtttctccatgttggtcaggctggtctcgaactcccgacctcaggtgatccgcctgccttggcctcccaaagtggcctcctgaacttatctctcttaactgaaattttgtatcctttgacaaacatctcctcagcctctagtaaccaccattctactctctacttctgtgtgttcaacttatattccacatatgagagaaatcaagcagtgtttgtctttctgtgcctcatttatttctcttaacataacatcctcccagttcatccatgttgtcatagatatgagcatttccttcttttttttttccttgagacagagtcttgctcttgttgcccaggctggagtgcagtggcacaatcttggctcactgcaacctctccctcccgggttcaagcaattctcctgcctcagcctcccaagtagcctggactacaggcatgtgccaccacacccagctaatttttatttttagtagagatggggtttctccatgttggtcaggctggtcttgagctcccgacctcaggtgatctgcccaccttggcttcccaaagtgttgggattacaggtgtgagccaccgcacctggccagcatttccttcttcttttaggctgaatagcattccattatatatataaatcacttttttttttttttgagacagagtcttgctctgccgcccagggtggagtgcagtgacacaatcccagctcactgcagcctgtacctcctgggttcaagcaattcttgtgcctcagtctcccaagtagctgggactacaggcacgtgccaccatgtccggctaatttttgtatttttagtagagacagggtttcaccatgctggccaggctggtctcgaactcctggcctcaagtcatctgcccacctctgcctcccaaagtactgggattacaggcatgagtcactgtacctggtcataaaccacattttctttctttctttctttcttttttctttttttttttttttttttttgagacggagtctcactctgccaccaggctagagtgcagtgatgcaatctcagctcactgcaacctccccctcccaggttcaagcgattctcctgcctcagcctcctgagtagcagggattacaggcgtgcaccactacacccagctaatttttgtatttttagtagagacgggtttcaccatgttggtcaggatggtctcggtctcctgacctcatgatctgcccacctcggcctcccaaagtgctggaattacaggcgtgaacaaccacgcccagccaccacattttctttatttgttcatcactaatggacacttaggttaattccatacttggctgttgtgaataccactgcaatgaacatgttagtatagatgcctcttcaacatactgatttcatctcctttgaatatatatccaatagtgagactgctgtatcctatggtggttctgtttttaattgtttgaggaacctccatactgttttctataatgggtgtactaatttacattccaccaacagtgtgcaagggttccctttctccacgtccttaggaacaatgttatagtagccattcgaacaggtgcaaggtaatatctcattgtggctttagattgcatttccctgatgattaatgatgctgagcattttttcatatacttgttggccatttgtatgtcttcttttgagaaatgtctattcagatcttttgcccattttaaaatttgggtattaacccctcatcagatatatggtttttaaatgttttctcccattccatacgttgtctcttcactccgttgattgtttcctttgctgtgcaaaagtttcttagtttcatataacactatttctctattttcactctttttgcctgtacttttggggtcatattaaaaaaattattgcccagacccaggtcatgcagcttttcctctatattttcttcttctagtaattttagtttgaggtcttgtgtttaaggcttaaatctatttggaattgatttttatttgagacagggtcttgctctgtcacccaggctggagtgcagtggtgcaatcaaggctcactgtagcctcaaagtcctgggcttaagtgatcctccctcctcagcctcttgaatagctgggtccgtaggcatgtgccaccatgcctagctaatttttttatttttagtagagatggggtacgggggtctctctatgtttcccaggctggtctcaatcttctgggcttgagcaatcctctcatctcagcctctcaaagtgctaggattaaaggtgtgagccataacacccgaccttcgatttttgtatatggtatgaggtgagagtctaatttcattctgcatgtggatatctagttgtccctacaccatttattaaaaagactgccctttacccattgtgtgttctttgcaccgttgttgaaaatcaattgactgtaaatgcataggtttattttgggtctctattctgttctattggtctatgtgtctgtacaaatgctattctatcagcaaatgttgggaagtgggagagggacagaagatttcagaacaagagtcttgaggtggggaaaaaaaacagtacattttaaggccgggtgcagtggttcatgcctgtaatcccaacacttttgggaggccgaggcaggtggatcacctgagaccaggagttcgagaccagcctaggcaacatggctaaactctgtctctacaaaaaaatacaaaaaattagccgggtatggtcgggggtcgctctgtcgcccaggctcgagtgcagtggcgcaatctcagctcactgcaacctctgcctcccggattcaagtgattcttctgcctcagcctcccgaatagctgggactacagctgtgcatcaccatgcccggctaatttttgcatttttagtagagacaggatttcaccatattggccaggctgttcttgaactcctgacctcgtgatccgcccgccttggcctcccaaagtgctgggattacaggcgtgagccaccgcatctggccagaggaattatattttaagagacaggatctctctatgttgcccaacctgatcatgaactcctgggctcaagggatcctcctgcctcagcctcctgagtaaccgggactacatgtgagagccaccgtatgcagccattggaggatattaagtagggagggctacctaattcatatttaagaagttgactttgggccatgtacggtggctcacacctgtaatcccaacattttgggaggccaggctgggcagatctcttgagcccaagagtttgagaccagcctgggtaacatggcaaaaccctgcctctactgaaaacacagaaaaattagctgggtgtggtggtgtatgcctgtggtcccagctacgcagaaggctgagatgggaggatcacctgagcctggggaggtcaaggctgcagtgagcactgatcgtgccactgtaccccagcctgggtgacaaagtgagaccctgtctcaaaaaatatatacattaattaattaaaataaaaaatcaagaaacagtttttgttgtggtttgtttgtttgttttttgagatggagtcttgctctgtcacccaggctggagtccaatggcgcaatctcggctcactgcaacctccgcctcctgggttcaagcgattctccagcctcggcctcctgagtagctgggattacaggcgcccgccaccaagcccacctaatttttgtatttttagcagaggcggggtttcaccatattggtcaggctggtctcgaactcctgacctcaggtgatctgcccgcctctgcctcccaaagtgctgggattacaggggtgatccaccgtacctggtcaactcccagtcttaacacaaacagagcatataatgatggcagacaacattccagagagggctacaagggaagtaatattcaaatgggaaggccaggtttcattcatgcagaaagtagaaggaactttctaggaatgggctggcagtatagacaactttatctcacatagattccatagtcctctcacagaggactccccattctccttaacctcagctccccagtgctgctcggcttccctccgctgccagagctcctcaacttcttgtaccccaaaccctcagcctgaagccccagcaatctccactgttctccccaagctccctctgcccatctttctcttcacaatgacttcacccctcagaattcccatacttctttataggccccacattgaaacccagccgtttatttaaaataaaacaattgggccaagcatggtggctcatgcccataatcccagcaactcaggcagcccaggcaagaggattccttgaggccaggagtttgagaccagtctgggcaacatagtgagaccccatctctatgaagaaaaaaaaaatttttttttttttgagagagactcttgctctgtcgcccaggctggagcaatctcagctcactgcaaactcttggaaaacagtctggctgttctatgaattttaaacatacagttactatatgattcagccattccattcctaggtatatatccaagagaaatgaaaatatatatccacacaaaaacttgtttgcaaatgttcatcacagcattattcataatagccgaaaagtagaagcaacccaaatatccatcaaccaaagaatagataaaaacaatatggtggccaggcacagtggctcacgcctgtaatcccagctctttgggaggccgaggtgggggggatcactcgaggtcaggagttcgagaccagcctggccaacatggcgaaaccctgtctctactaaaaataccaaaaaaattagccgggcatggtggcaggcgcctgtaatcccagctacttgggaggctgaggcaagaaaactgcttgaacccgggaggtggaggttgcaatgagccgagatcgtgccattgcactccaatccagcctgggcaacaagagcaaaactaaaaaaatgaaaaaaccacaatatgctatatccagacaatggattattacgcagcaataaaaagaaatgaaatactaatacatgctacaacatgaatgaccctcaaaaaacattaaatgaaagaaaccagtcacaagaggccacatattggattgttccatttctataaagtgtgctgccccacccactcccatggccaattttagacctcaacaccagaattgtttgaattctgaaatttttaatttatgccttctgtgttctcaccatcctattattctggttttcattcattacccctagtacgcctgttgttctaccccattgagacaccacactttttatctcttctctttatagtctattgaccctctcccctctttgcttctcccatctagttcccatctggtctattgttttaatttctctcttgccagtattaactcccttgctcaattgtcttcctatctcgtccacctagaaagacctcaaccctccaattgtctatttattccatgcctgcctccggattcttgagtactatcgaagaaaatcatgcaaatattatattggtaccactaaatatggttttcaacctttattaagttatactctgtccaccttcttcaaaaccaccatttataactacattagattgttagggctgccataaaaaagtgccactatgtgggtggcttaaagcaatggaaatgtattgtttggtagttatggaggctggaagtctgaaatcaaggtgttgacagggccacgctctatctgtaggttccaggagaggaagcttccttgccttttctagcttctggagattgccaacaatccctggcatttcttaccttgcacctgcataactccaatctctgccactgttatcacatgacattctccctgggtgtctgtctctgtgtctcttctcttcctcttcttttttttttttttttttttttgagatggagtctcattgtgacacccaggctggagtgcaatggcgcgtctccactcactgcaacctccacctcccaggttcaagtgattctcctgcctcagcctcctgagtagctgggattaaaggcacccaccaccacgcctggctaatttttatatttttagtagagacggggtttcaccatgttgataaggctggtcttgaactcctgacctcatgatccacctgccttagcctcccaaagtgctgggattacaggcatgagccaccatgcccggccaatacgtatgaattctatctgctcctcgccaatctccactgcctccttcctaggtaagactaacgtcttctctcacctggactactacaactgacttgatcagcaagttatgttgatagagcatttcaggcagaaagaatagcacaattcaagaattggcttgaagattttgaggacaaaaggaaagccaagatcagtgtgactggaagataatgagtgagggttgcagtataaaagatgaggtctgaggcagggcgaggtggctcacgcctgtaatcccagcactttgggaggccgaggcgggtggatcacgagttcaggagatcgagaccatcctggctaacacagtgaaatcccatctctactaaaaacagaaaaaattagccgggcgtggtggtgggcgcctgtattcccagctactcgggaggctgaggcgggagaatggtgtgaacccgggaggcagagcttgcagtaagcgaagatcgtgccactgcactccagcctgggcaacagagcgagactccgtctcaaaaaaaaaaaaaaaaaaaaaaaagatgaggtctgagaggcaggcagagtccagattttgggggccttgaaggtccatgataaggagtttgcattttattttattttattttaagcaaagcagtgacatgttttaaaagggctctcttagctggtttacagagaatagattgtagatcatagcatagtttacttccagcatgctctttaggcttggcaagttgagatgttaatgcgaccccaattttggggcttgctctagcttgctttcactgtatatgaaactggaaagctatccaagttgttttcattttagcttcaaataaggaaacctcttttattctctgttaactgccaaggatcaagagtccctccctggaagaggtaaggtgatacattctttccctggagaaaaaaactgttagaggaagccagaaagaagaagggaaggggggcagtgtcccaatcccattagattatgcaatcaagccgaaggtacccacctccattcaaataaagtgattgtgctttcctaaaacgaaaagccattgtctatcaagaatttatgctgatttacaaatttatctatgtgaaaatctttaggaaagttaaatatttaataaatcaccttttttttttttttgagatggagtctcactctgttgcccaggctgcagtgcaatggcgcgatctcggctcaccgcaacctctgcctccggggttcaagcaactctcctgcctcagcctcctgagtagttgggattacaggtgcctgccaccacccccggctaatttttgtatttttagtagagacaaggtttcaccacgttggccagactggtcttgatcagcaagttatgttgatagtgcatcctgacctcaggtgatccacccacctcggcctcccaaagtgctgggattacaagtgtgagccaccacgcccagccaatcaccttttttttttagagataaggtctccctctgtcacccatgctgagcacagtggcatgatcacaactcattgcagcctcaaactcccggctcaagtgatcctcccacctcagcctcccaagtagctgggaccacgggcacataccactaggcccaggtaattatttttactttttgtagagatggggtcttgctctgttgcccaggctggtctcaaattcctggacatgagcgatcctcccacctgggcttctgaaaatgctgggattataggtgtgagccaccttgcccagccataaatcatggtttgttttttatttttttgagacagagtctcactccgtcacccaagctggagtgcagtggcatgatcccggctaactgcaacctccgcctttggtgttcaagagatcctcctgcctcagcttcctgagtagctggaattacaggtgcacactaccacacctggctaatttttgtatttttagtcgagacagggtttcaccatgttggccaggctggtctcaaactcctggcctcaagtgatccacctgactcggcctcccaaagtgttgggattacaggtgtgagccactgagcctggccaaatgacctttattaaaaagacaaattttatgctgaaactgttctagaactttcagaatatatatactctatgactacaggacaatatttgccaatgggatcagttatgatgtctgtttctctttgaggaacagtctatgccctttacctgtcaattaacccagcagagggctggtttctgtgtcttattggcccccacacaaagttgttttctttgccccttagtgcagtgcagacaattctattaagaaaccattctattggccgggcgcggtgtttcatgcctgtaatcccagcactttgggaggctgaggctggcggtcacttgaggtcaggagtttgagaccagcctggctgatgtggtgaaacgctgtctctactaaaaatacaaaaattagccaggtgtggtgtcatgtgcctgtaatcccagctactcgggaggctaaggcatgagaatctcttgaacctgagagaagaaggttgcaatgagccaagatcacgccactgtactccagtctgggtgacagaacaagactctgtctcaaaaaaaaaaaaaaaaaaaaaaaaaaaagaaaaagaaaaagaaacctttctatgaatcttattgttgtgtttattgtaataatgtaattgaagatatttgttacattagttttcaagaatggctgtacaatttgctgagcaatgcttgattaactcagatgcaataacctgtgtaatagcctattttcttgctttgtattgattgctagacagcttaggtattgctcacctgtagcagatatagatcaatatgatccacattttagccccattcttggcttcattttgttcccttgttttcttttcctattgattcacatttgatttatcttgtcttgcattttacatatcttactaagactttaaaatcaattcttaaacatggcaaaataggaaggggtgaatgatattgaatatactgaaaccatttccaagcaggcattaaattctatccttttttgagacagagtctcactctgccacccgggctggagtgcagtggcacgatctcagctcactgcagcctccgctttccaggctcatgcctcagccccctgagtatctgggattacaggcctgtgccaccatgcccaactaatttttgttttcttagtagacacagggttttgccatgctggccaggtggtctcaaactcctggcctgaaatgatccatccgcctcaacctcccaaagtgctggacgggtagattgcttgagcttaggagttcaagaccagcctgggcaacatggcaagaccccgtctctacaaaaaagagataaataaattgttggccgtggtggtgcacagctgtggtcctggctactcaggaggctgagatgggaggattgcttgagcccaggaggcagaggttacggtgaaccaagattgcgctactgcactccagcctgggccacagagggagaccctgtctcaaaaaaaagtaaaaatatggccaggcacgttggcttacacttgtaatcccagcactttggaaggccaaggcagacggatcacctgaggtcaggagtttgagaccagcctggccaatgtggtgaaaccccgtctctactaaaaatacaaaaaaattagccaggcgtggtggcaggcgcctgcaatcccagctacttggaaggctgaggcaggagaatagcttgaacatgggaggcagaggtttcagggagccaagacggtgccattgcactccagcctgggcaacaagaacgaaactcaatctcgaaaaaataaaagaaaaagaaaaagaaaaaataatggaaattatttgtttgcattcctgtctctataactagactataaactcttttgaaggcagttattgttcattcattcaacaaatacaatggagtcacattatgtacccatttgacttacttgacttcttagggaaaacataaaaaaaagaagaaagaccaatactctatgattccacttatgtaaggtacctggagtagtcacgttcatagagacaaaaagtagaagggtggctgccaggggctgggaggaaagggaaatgggaagctgctcaaatgggtagagggtttcagttttgcaaaataaaaaagttccagagatctgttgcacagcaatgtgaatatagttaacagtataaagtatgcgcttcaaaatggctaagatggtgaattttgttatgtgtttattaccacaattttttaaaaaaagaaaaggaagaagaatcagctagcagtgcttgagatgagaacatgaatctgtgctgtttccacggctggtcttggttccttccttcatagagtatgcatctcactgggctgaatgtgattttattgtttaaagataaatgtttctggccaggtgcggtggctcacgcctgtaatcccagcactttgggaggctgaggcaggaggatcacctgaggtcaggagttcgagaccagcctgtccaacgtggtgaaaccctgtctctgctaaaaatacgaaaattagctgggcatgatggcgggcgcctgtaatctcagctacttaggaggctgaagcaagagaattgcttgaacctgggaggcagaggttgcagtgagccaagatcacaccactgcactccgtcctgggcaacaagagcaaaactacaactcaaaaaaaaaaaaaaaaaggataaatgtttcttacaacatggcccctacatgcaaggcagctgcttacatgggccttaatcaaagaaactgttttcctattggaggggaaaaatggtcatactaaacttgttaagagaagagagagttaaaagaatcttcaaggatcatttttactatatgagtattaccatatagtaaaatatattatatatcaaaaatatattacgtatatcatggagttcctagtaccagtttttactactgttttctttcctcaccaactctcaagcgatatgtctaatctttgaggccctggctgttgggttttctctgttctccaagtcagcacctctcagaaggcaagtggacagcctcaagtgcccaaacctaagggacttggcagctcccagctgaagccatccttcacagagtcagtggaaccaatcatcaacatgatatgattttaaggatgggaagatatgtcctctgcaccttgcaaactcatgttattcgtttgctcatatagtccctatgctgaatatgtcttccttcaaccctgctatggcttgagtattttgagtgtgtcctccaaaagttcatgtgttggaaacttaatccccaataccatagcgttgggaggtgggccctaataagaacgcgattgggtcatgagggctgagtcactgggaattgattaatgttgtcatcacagaagcaggttagttattatgagtgggtttttgtttttttgttttgttttgttttgagatggagtctcactctgtcgcccaggctggagtgcagtggcatcatcttggcttactgcaacctctgcctcccgggttcaagcgattatcttgcctcagcctcctgagtagctgggattacaggtgcgcaccaccacgcccggctaatttttgtatttttagtagagaaagggtttctactaagctccatcagggctggtcttgaactcctgtcctcgtgatccgcctgccttggcctcccaaagtgctgagattacaggcgtaagccaccgcgcccagccaagagtgggttgttataaagcgaatccagccccggatgcctttctctgtttcacatgttcgcttccaccttctgccctttgcccatgggataaagcagcacaaggccctcactggataccagcaccacactctttaacttcccagcctccagaactgtgagctaaataaatgtctgttcatcacagattaaccattctgtagcattctgttacagcaacagaaaatcgatcaagacaaactccactcaagtttcattcagtcttcaggacccagctcagtcccttatcctccgtgaagccttcttaccattttctccattgttccactcacttgtcatgtgaacatttaattaccttctttctcttatttacctgagttaaactattatgtatttctcacataattctttatttctttctttacttttttttcttttttcagacacagggtctcactctgtcacctagcctggagtgctgtggcatgaccatggctcactgcagcctcaaactcctggctcaagtgatcctcctttctcagctgcccagatagctgggactacaggcgtgtaccaccaggcccagctatttcagagacagggtctcagtgtgttgcacaggctgtattctttttttcttttttgagacagagtctcactctgtcacccagactggagtgcagtggcatgatctcagctctctgcaacctctgcctcccgggttcaagcgatcctcatgcctcagcctcccacgtagctgggactacaggtgtgcaccaccacgcctggctaatttttgtgtttttagtagatatggggttttgccatattggccaggctggtctcgaactcctgacctcatgtgatccatccgccttggcctcccaaaatgctgggattacaggagtgagccacaactcccggcccaggctgtattcttttttttttttttttttttttgagacagactctcactctgttgcccaagctggagtgcagtggtgcgatctcggctcactgcaagctccgcctcccaggttcacgccattctcttgcctcaacctcctgagtagctgggactacacacgcctgccaccatgcccggctaattttttgtatttttagtagagacagggtttcactgtgttagccaggatggtctcaatctcctgaccttgtgatccgcccgcctcagcctcccaaagtgctggaattacaggcgttagccactgcgcccggctaggctatattctttacttcttttgttattatttaatatgtcatgtttgcaggccttgactcccccattatcaataaatacaggtaaagtttataggccagacattcttcaaaggactttttatgaacattatatataaccttcccaacagctccatgatataagaactattattgtctccatttgacatatgaggaaacttgaggaaagatagctgtggtgactttgcacaagttcacacagcaagaatgaggcatagctggagtttaatttcaggctgtctgacaccatagctcaaacctatgttcaatgtgcaggattggagggatctttagtgtttatctagtcaacttccctctcttgcactgctctttctcttcctctaaaccaagctcaaatcccttttccagtttcccaagtcgttatctaaactctttttttactttttgctttctatttttatttatttattttttttaagatggagtctcactctttcacccaggctggagtgcagtggcatgatctcggctcattgcaacctccacctctttggttcagcaattctcctgcctcagcctcccaagtagctgggattacaggtgtgcgccaccccatccagctaattttttttaatttttatcagaaacggggtttcatcatgttggccaggctagtctcgaactcctggcttcaagtgatccacctgccttggcctcccaaggtgctgggattacaggtgtgagccaccacacctggcctattttttatttttttgagacagggtctccctctgtttcccagcccaggctggagtgcagtggtgtgatctcagctcactacagtctcgacctctcaggctcaagcaatcctcccaccttagtctcctgagtagctgggactacagccacacaccaccatgcccagctaatttttaaatattttttagagacagagtctccctatatttcccaggttggtctcaaactcctgttctcaaggagtcctcccacctcagcctccctaagtgctgggattacagatgtgagccaccacacccacccctaagctcttcttgccatggagaacttagtattttgccttttccatctttagacttaaaaagctctcctttaaattcatctgacttctgcctaaggaggaatatagtatagtagctcatctgtacaatggagattatagtagctatctcccaggatggttgtaaggaatgaatgaagtcaggacaaaagcatttagctcagtgcctggcaccaggagctgctgaacacacagcagcaatgagctatcctttacttctctttacagatctgtgctttggagccacacaaaccaatcacttctcttttacccatggtagtccttcagtcttttttttttttttttttaacatggagtcttgctctgtcacccaggctggagtgcagtggtgtgatctcagctcactgcaacctccgcctcctgggttcaagctattctcctgcctcagcttccggagtagctgggactaaggtgcatgccaccacgcccggctaatttttgtatttttagtagagacgggagtgttggccaggctggactcgaacttctgacctcatgatccgcctgcctcggcctcccaaagtgctgggattacagatgtgagccactacgcccggccagtccttcagtcttgaaagctgtgatcatttgctctaagttgtcatcactctgctcttcctcttcctccttttctttttttatctctatatctctagttccttcaactgaatctcacaaggcattgtttctaggccccttattattctgtcctcctctgcccctctcactgtggtcactgaacagagtgaaaccacaatttccttgggtttgtgctacgtgtctattaatgaagcccacaattgtattagcatttaggccgccgcattatattcagctagctccagccagctccattgagttcgtagccacctacagcaccatttcttccccatctgaaactgtgaaatcatgtttttttacattctatacctgtgcagttggtttcatgaattcagatggataatttgactgttttctctcttttattttatctcctctgattcagcctatcttatcctaacatcttttggaatctttatgtcttcttccatttatgcacagattttgaggacaggattgttgcaaggtaagagaattcctgtaaagcacaagtacgtggcatgcaataagtccttgataaacattaacaatggtgattgttattattatcctcagcacagcatctggcccatagttgactctcaataaatagtcactgattaatgaatgagtgactggatccatgattggtgaaatgaatgaatgttccctctcctgaatcctaggcccagtaaatttgatattatccttcttttacagataggaaaactgaggctcagagagcttaaggaacttccccaaagtagctcagctggagagtggtaaaaccaggactagaactcaggtctgcctgattcccaggcctgtgtgactaacacttccccactatactttcttacatctgtattcaggtcagaactagttgtggagtcagaagtctgaggggtttcccgagattgtatgttccatgccctagaaaagcgggttctcctgttgtgaccctgggagatgtggaggggccatgagatgggggacagagcactggaagcctcttctcttttctcccccatgggcctctcaattttcactgccttaaactctgcttagctgtttctcgcaagaaactaacagcgctgtgtgtccccaaggagaaacttttaagaccaaggagccaagacccagggaggtgattcaacagcttgccaggactgcagtcagtggagtcaagggcccagagagcagcagcaagaatggtataaagaacactgagggcccagcgcagtggctcatacctgtaatcccagcactttgggaaaccaaggtaggaggattgcttgaggccaggagttcaagagcagcctggcgaacatgatgaaaccccatctctactaaaaatacaaaaattagcctggcatggtggcactcgtctgtagtcccagctactcaggaggctgagacaggagaatctcttgaacccaggaggcagaggttgcagtgagtgagctgacattgtgccactgcactccagcctaggcgacagagggacactctgtctcaaaaaaaaaaaaaaaaaagaagaacactgagggccaggtgcggtggctcatgcctgtaatccagcactttgggaggctaaggtaggaggatcgcttgaggctaggagttcaagaccagcctggataacacagtgagacctcatctcttaaaaaaaaaaaaaagtttaaaagttagccagatgtggtggcacacacctgtggtcctggtacttgggaggctaaggtgaaagctgcagtgaggtgagctatgattgttccactgaattgcagcctgggcaacaaagcaagaaagaccctgtctttaaaaaaaaaaaaaagaagaagaagaagaatgcagacctgcaggaagctgtagttatcactctgcctctttggatatcagcttccgcatctgtaaaaagtgagggtggagagttcttgctttacctgcttcactacgcaaggcatggcaatgataacagctaacacatcctgagtgccacctctgtgcctgctcctgtgttgagtgcttctcatatccttgcagttagcaccatgaaataagcatattgttaaccctcttttttttttttttttttacaaatgaggaaaccaaggttcatggaattaagttacttgcccaaggcctctaactctaagtgacagaactgaaattttgaaagtgtgcagccttcagagctgagtgaccatgggtggagagtgtttgtgaactctcaagtatgatagatgccttgtaccctttggggcaagaatgaacagtaccagtttgcagcttgttatggttgcggttggaggtgggtggctgggggagagtgttttccaaggaggcagctgaacagatcctgtggttaggatgggtgacctgatcacatccccagagtctgggtgggaaaatgcaggagggtccacagtctgaaagagagccctagggcaggttgtggtggtagaggaaactcctagcgtgtcaatccaaacagtccattgggagcccaggccttcagtaggaggggcattgtggctcagatgacatgaacctctctgactgggctaaggcagagagaagctccagttcggtcagaactttccaagaaaccagggacacgcagcccaggaaataatacctgtgggagtcagccccacctgtgacccattcatcttatctatctgcccttgggtttctggccccccagtttctacactgctctccctggatccccagcccactccttggcttccccagcacctcccttccaggcccattctcccctcacacacaccacagctctgtctgccacggcagctcctttgtttacttccagagctgccaggcccaccactagccaaacacaacgaagcccagccagtgaggggaggctccaggctcagtctgtcccctcagagagaggtaatagcctccagaccaaggaggcagctcaaaggtaggctgcccccgcactgtgcccaagcttcaggcctagagggaaagggcacaaggtctgcccatagctgggtaggaatccctactgttgaagcagctttggtgaggagccccaggaatcaaagacccagctggagggaggtaggggaaatgttgaagccccctgggtgggaagtggaggcttagactgctcctggttctccctgtgtctattctgccaggtagaactggagtcctcagcccaaggcacccatatgcctgtctccccaccagagggctatgttcccctcccaaaagtctgtgccctgtgcctccccaaagattccagctgagaaaaggaagtgagcatttactctgggccaagccccaagcaggaaacattgtcagggtgtgcctggcatttgtctgtctgaggttagtggggagtttatttatctgatgtataattatgtatttatataatgtgtaatataaaggcaggggactccgattctgtttctggagctgggggctgatgggtgagcagtgaggtgtagtgagggtgtcaagctggagggcaacagggccacagacatggtcatgtgaggaacagtggtcagtggcgagaggagatgccccaacagggagaaggagagccttggcagcccagattccccaggggagagataaaggactctttcaatggtgcccaggtaattctgtgagtatgggggtagcagggcaggcagatattggtcgatgatgtaggaatgattttagaagaaatgaaatccccaatttccctcccttttagggatctattttggagacaacaaacttgactaaggaatctcaagaagaaaatataattctgctgccaggccccaatggagcaaatagagctcgggacccaggggcctttggaaggaacaggaatgcggttagaggtgagcactggccctgcttagctgcactctctgtcccattgtgcttcagtttccaggagtgggggtggggatagggctctgaaaactgagtttatacatgaagcaacccacctccctgccctgggtcagtaattcttcaaggggtcactgggtcccctggagtaaacaagaaatttgccacagttttaggcacagttttgctttttatctcatcaatatacatttaaatctaacagtctaacagcctcacactcctcaactctatccaagccctctcctcttctctcccactcttgcccagtcagcttctcaactgtcccagggacaggaagtcaccaggcacaaatgtgatttgaggaggcagtggcacctgtggctctcctgagaggtgcttaggagagtccagaggctgagaaggcccaggtgaggagaaatggtgggctgagtctcatcggaaagcactgtttcctgggactcagtcccattcagagtctgtctccctggacctgtgcctgccactggtcacatcagcagacgggcagcaatcctcagccaggggaacttgtggataaaagggggcctttagcccaagtcacactcagagagcgagcaagcttattggaatcccctttcacccaagctgtgtagatgctcctgccacagcttcctgacccctctgtgattccaggagtgcaggaaggggctcttgggatgtgccacccaggaagacagagggccagtgctgctacctgcagccacacgactccacgaccatgtcctcatactgcttatacaccacgttgttggcagagtcaatgaagaggatgctgatgggactcagccgcgtgggcacacagcaggtgggtggtgtggactcggggtccatggagttcatcagggtctggatgactgcatgattcgtgggctccaggtgggagcgcaatgggaactcgcacagcccctcgcagtggaaagcctcgtactcaaggggtgcgatgatccagtcgtcccagcccatgtccttgaagttgacatgcagtgccttccgactgcagcgagccttaaggttcttgctgggtcgcttgccctggcgagtggccagtggggcccgccgttttcgccgctggctgaacaggtactcatacacggtcttatcgtcctggccagagcgggccttaatctcattaaagaacaggtcccgtttcttggtgcggccaaacaccaggaacagggctttctcgtggacctgccgggcggcgcggtcgaagcccaggccacggaggtccacggccctgccccgttcccaggcctccagctccaggcacagctgggccgagttcttaaagtttcggaagagcttccagatgtcgaacacctcccagccagatccgtccaggcctggcacggagcgcacatccagcaaggcggccggctgccggccgctggggcagctggacagcttcagctgggcagcccgcccgcctccgggggccgctggcttggccgtgtccgagggcttcttccgcaagatccgcagctcggcccccagcagcccatccttctccagggcactaatgtcaaacacgtacctctgcttcctgaccacgggacctcggtcatctagagagaacacccagaagtcattccctgcaacctcaccaagggagccagtcacttcgaggctgcgggggaaggccccagctctctcccagtccagagagctttctttcacctctgccccattctgacagaagccaagagccaaaccactgagagcctttttgaaaatgagagcatttcctacatagccgaccaagtaggggtgttcacctgaagatgtggctggggatgatttgcgtgattctggtgtttgtgtcatgatatacgtgttatcagagatttatcagctttgtaactgccttctacctatctctctcccagccatgagctaacgtgatgtctcatttgtgagataggtggagtgagcattaaaattactcctgttgactgggcacagtggctcacacctgcaatcccagcactttgggaggctgaggtgggtggattgcttgagctccggagttcgaaaccagcctgcacaacatggtgacactctgtctctacaaaaaatacaaaaattaaccaggcatggtggcgtgcacatgtagtcccagctactcaggaggctgaggtgggaggattgattgaccccagggaggtcaaggcttcagtgagccgtgaattcgctattgcactccggcctgggcaacagagaaagaccctggctaaaaaaaaaaaaaaaaaaaaaaaaaaaaaaaaaaaaaaaaaaaaaaaatacacgcttttccagaggagaatcccaaggttcagagaagttagatgacttgctcaaattctcagctgcttccaccatcccttaaaggagaccttggtgctcttgttatgcagatgaggcacagagatggggagtgacttgactaaggtcacacagcaagttaatgacaaagctggtccacactgacctacagcccaattttcctggctttccagtgcaaggattttgttgcctatgtgtcttactctcctgagcatgtgtgtgtgttacagttgtatgcatgtgtgtgattgggttcatatgtgaatatgaaagagtgtatacgttaatgacgcattatatgtataaatgattgggcttgtgtgactatttgaagagcacatatatgtctgtatatgcatgattgatcttgtgtgtgtatgtaagaaggtgtgtgtgcacatgcatatgtgtgtgattcggcatgtgtgtacgtgtgtgattcagcacgtgtgtgtgtgagtcagcatgcatgtacatgtgtgattcagcatgtgtgtataaacataaggctatgtatgtgtatgtgagaagctcagtagtatctccgaatcagcatgccctccttcctaaattgcaatttgccattggggagctttcatatattgctctagaaggtgactaattaggcctttaaactccccatctccccctctccaagctcccttagtgctggggggcacacggacttattttatgagcccccaaggggtcacagctttccctggctgggcaggcagccagaccacctcccccacctcagccagacctgctgcctctgtgcctcccccgccccctggcagccccctccaggccagctctaatgaggagcctctcccaccctctgacccctcccccaccctgccagcctaggaccagagcaaatgagctgcaggcaacttgagcgaccaacagcccacctccctcttcacactaggaagaaactgaggccctgagagggggagggacttgcttagatcacacagcaagtggagaggaaaagctgcaacagtaacattaggtgggccgagagagacagaggggagcaggtagtctctggagttaatgaggagaatgaggcatgttcaggacagcatctaaagttttcatgttggaagggctctcagaaaccaccctgtccaaccccatataggtgtacagatgggaaaacggagaccccaagtgagaaggagctttcccaaggtcatactgcgagttaggccctgggtctgctccctccccatgtatctgaacatcattccatgactccaagatgccccatttactgtgtgcacctctcttgcctcctctatccccttgcctgagggcaaagttgcagaagcatggggacctcaagattcatttctttctctgccgtctgagaccgcctacaaacctgtgaagcttggaaagttcggccagcccagcaggtacagatgcacaactgagcaatcaagtctcggaatctggtctccaactctgccacgaactggcaggtcttgtctcttctctaggctttagtgcccactctgcaccttgcaggcgttggacctggtgcttcctaggtgccctccagccctgatgtgtgggcagcctaggatctgctatgtgtgagatatgtgtcagtgtccccagacacccaccccgggccagatgcacacagtgtctcccaccagggcagtgccagggctttgaaagcccctccattcatgcagatgcccctccctctgagccgtgcccctgccaccccgccccctcaccttgccctttgtcaataaagctggtgatggtgttggccaggccagcctccaacttcacgctgctgttgcctccctttctgtcagcatcggacagcgtcctgtacagcgagagcatgtactcgtggggtgtgatggggggtgggcgaaacggctccttgggctctcgtgggggcccgggctccctggccttcttcagcaggaaggagctggggacagatcctgcttttgggggtgccttgcctccgggaagctgtccttttggggtcacagtccgggctgtagcctgccttgtttggggagggtgtcctggcttgggttcagggccgcccggtctggggggcagctttttgggttcatccttcttgggctgtgtcaggcctcctgtctgcccggtgcctccctttgccctggcattggcattggtggcccccccaccatagctgtgaccccctggcctgaagacgttccgggccagggggggcctctccttggcctctgctttggccaatcctggcctggtcccctggggtctctggcccaagtcaggggcacccaacacagtgcagatgaattccaggtccagccaagccaggtaccaaagcaagaaagtgaggagtttggggagtctcatcctctggccagccgctgaatgacaccaaagagaacagcggcagcagcgaaggtgcctctggtttggcaggaaaaaccatgaaaggagtggactttcaaaagcagcggcagcagcagtagcagcagaaggaaaggctttctcctcagtctgagactcttgaagtctgccgggtgtgtgtttgtatccagtcccatagtggaaatgctctcgtatccagacgtgcaccgtctccagtcagcagctgaaaataactcgttcttgaaaggagaaagccgaccgccccctttctcctgcacaactgactgagggcttgaaggaggcttgtataaggctgagggatttttccaagaaggaagaatggcgtaatgctgcctgtgtgctccagtttttttttccccctagttttgaatcctttccagtgaaaatacttcacacacacacacacacacacacacacacacactcacaggcctgcaggtgctcagaaaaatcttttacaaacctgaactcaggaattggaaacggaattccaacccaaaccaatttaattactctctgatgtcatgctgtctaaactcatttaagtgcgatatatttatgtgaaaaaaatcaccgctgccctttcgaggccatggctcacgggggctcctggcacagagccctgcagcgggactctaggcttagggggcctccccctccacagggcagactcaggggtcttcacctccacctcatggagcagcccaccccactttcccgaggagagatgctgaagaatgagctcaaagatcttaagccccagaagcatggggagtgtgggtttgtagttaagttcttagagtgtttttaaagcagtttcaactcctgcatctagtctgggacctgatttgttatgcgtgtgtgtgtgtgtgtgtgtgtgtgtgtgtgtgtgtttatgtgcctgtgtgtgtgtgtgcctgtgtgtgtgtgtgcctgtgtgtgtgtattgggagtagggacagcacagatggcagcatttacccacattttcttttattttaataaacttgtggtgacccagagactgaaaaatatcagtgcccactacaccccctccctacccccaaatgccattgactgagtgcatattcttcaggcttgggggcactgtcgcccttaagttcactccttggatggcggcaggtccagggtgtaccccaccaccaccccagcagagacgtcctctgagttttcttagacaagactggctgagtctggggcagcagcggcccctacaggaggctggaaaagccatttcccacatgacgctttttttttttttttttttgagacggagtctcgctctgtcgagtgcagtggcatgatctcagctcactgcaatctctgcctcccaggttcacgccattcccctgcctcagcctccccagtagctgggactacaggcccctgccaccacacctggctgattttttacgtttgtagtagagatggggtttcaccatgttagccaggatggtctcgatctcctgacctcgtgatccgcccgcctcggcctcccaaagtgctgggattacaggcgtgagccaccgcgccgggcacaatttcccacatgatgtttttctggtagctctggaaggtctgaattccagctgaactcaagggtttcttaaagtgcctcattgaagtatggaagatcccttcctctggggaaccttcgccgtagagcccctgggcaacttaacacagggtcagcggggaaagctgttcgcttcacctgaaatatcctcctctctctctcccacaactggaggaagcactctacatcctgagaagtttagctgaaaatttacctccttcgggaagcctttcctcgtccccagacagagccagttaccccttctgtacatttctctacaacaacacttttcacgctgtaagaaggatggcgggggagaagcaatagtcagataggcttccttcttttttttttttttttttttttttttgagacagagtctcactctgtcacctaggctggagtgcagtggtgcgatcttggctcactgtaatctccacctcctgggttcaaacgattctcctgcctcagcctctcgagtagctgggactacaggtgcacaccaccatgcctatctattttttgtatttttagtagagacggagtttcaccatgttggccagtctggtctcgagctcctgacctcaagtgatccacccaccttggcctctcaaagtgctgggattgcaggcatctctaccaaaaatacaaaaaattagccgggtgtggaggcaaaggttgcagtgagccgagatcgcaccactgcactccagcctaggtgacagagctagagtccatcacacacacacaaaataagtaaataaataatattaataaaataaaaaaattaaaaacagacttgttcccactgaaccagtcctctctggcatccctcccttcactccctcctcaccacctctgtcactgccctgtcctcctcattgcttgcctcgctatgattctcccctataactggcttctaggcctccaggctctctctggttcaaccctctactaaaagctacccatcaaacaagtgccaacccacgtgccacctcctccatgaagccttcttgcatcctccagaaaatgcacactccccctgagctgccatcacacattttctgtgctcttttacattttttggcagctgaaagtttattcagtctctgcctctgccccctatcccaacacagtttgtttcttccactctgtattttgtcatattttaaaatcataacttaattccttataactataataatttctttacatacctgtctctcccattagattatgactagactgtgccatatttatctttgaattatacccagtgcttggcagagggcccagcccacagcagctctcagtacgtgttatatgaataaattaatctctaactggcccttattgacaaaaatcatcattttctactttgaggtgtagttatttgtggacataacctgcctttcccattagactctaagtttcttgaagggaagaattgtcttgccacttcttaagcattttgtaagctcagagagtgaataaatgaatgagttgaacaaccacaatgtctctgtacgtggcttgataaagagcaaggattctggagacaaacagacctggttttgaagcttggttctgctatttatgtattgtgtgatcttgggaagcctctaaacccctctgaaactctaaacagtgataacgatagtgcttacctcacaggactcttgttggagattcaatgaagtaaattgcggccaggcgcagtggctcacgcctgtaatcccagcactttgggaggccgaggcaggtggatcacgaggtcaggagatcaagaccatcctggctaacatggtgaaaccctgtctctactaaaaaaataaataaaattaaattgcataaagtgatcaactattaatggcaattgttaatgatagctttttttttttttttttttagatggagtctcactctgtcacccaggctggagtacagtggcatgatcttggctcactgcaacctccaccccccgggttcaagtgattctcctgcctcagcctcccaagtagctgggactacaggtgcgtgccaccacgcccggctaatttttgtatttttagtagagatggggtttcactgtggtagccaggatggtctcgatctcctgaccttgtgatctgcctgcctcggcctcccaaagtcctgggattacaggtgtaagccaccatacccggccaataatagctattttttttaaagcacttattccagtcaactagactctgggttttgtactccattgcatttatgtgttatttatcttcatgacaatgctatgaaggtagtggttttcattgttgttttttgagacagggtcttacctgttgcccaggttggagtgcaatggcgtgatcatggggctcaggtgatcctcccacctcagcctcccaagtagctaggactacaggtgcacatcacgatgcccagctaatttttgtattctttgtagagacagggtctcaccatgttgcccaggctggtctcaaatttctgggctcaagtgatctgcccgccttggcttcccaaagtgctgagattacaggtgtgaatcaccacatgtggccgaaagtaactttttttatttttttgagatggagcctcgctctctcacccagtctggagtgcagtggcgcaatctcagctcactgcaacccccgcctcctgggttcaaggggttttcctgcttcagcctcctgagtagctgggattacagatgtgtaccaccacgcccagctaatttttgtatttttagtagagatggggtttcaccatgttggccaggctggtcccaactcctgacctcaggtgatccacaaaaaagcattttgtaagctcagagagtgaataaatgaacgagttgaacaaccacaatgtctctgtatgtggcttggcctcccctagtgctgggattacaggcatcagccgccgtgcccagcccgaaggtaactcttgatacccgtctttttttttttttttttttgagacagagtcttgctctgtcacttaggctagagtgaagagtgcagtggctcaatctcagctcattacaacctctgcctcccagtttaagtgattctcctgcctcagcctcccaagtagctgggactaccgatgcgcaccaagacgcccggctaattttttgtatttttgtggagacgggggtttcaccatgttggccaggctggtctcgaactcctgacctcaagtgatctgcccacctcggcctcccaaagtgctaggattacaggcatgagccaccatgcctggcccaatactctcattttaaagataaataaatttaggttcagaaaggttaaattattttttaaatctaattttggcttcaacacattttatacccaaaaagcctaatctggcccctagaaacactagaagtgatagggcactggggaaagttacagtattcctttcagtcaacgtctaacccagtgggctgggactttggggacatggaggagtctcgaggccagggctattgtttgaggaacagggaactcccagaaatgggctgggagcagggaaaggggactctgagcttggttagaaggccctctccagagaggagcccagggttcctgcctggctctcactataaaggtgactaatcactttggttccctctggtaattgcaaccagatgctgccgctggcagtgcttcagtcccgacatgtttaattactgggacacagcgtccctgggtcccccgtgtcccccaacctccccctctcctgtcagcaatattaatgtcaaacttgaggtagaggatgggagccttgggaagccactgacatggaagtaatctctgcagccccttctgccatgtagagccttttgcttttatgtttccccatccattgtctcattgctgttccataaaccatccttataaagtcagttggccagattattattattattattattatttttggagacagagtctagttctgttgcccaggctggagtgcaatggcatgatatcggctcactgcaacctctgcctcccaggttcgagcgattctcctgtctcagcctcccaagtagctgggactacaggcatgcgccaccacccctggctaatttttgtatttttagtagagacagggtttcaccatgctggccaggctggtctcgaactcctgacctcaaatgatccacccacctcagcctcccaaagtgctgggattacaggcgtgagccactgcgccggccggccagattattattatcccttttttattgtgtctccagatgagtaaacagtgaactgagtgataataataataatccctttttcaagcacttgtcaattttcaaaatggcttcccattcatgatgctatccgaacctcccgagatctctccgggagtcagtcctgcacagcacagcagctgagagaacaggcgctgggaccagacaatgcagtgttccagttctgccatttgccaattgggtgatgttgggtattcatttctttatctacttaactattcagcaaacatttattgggtgcctaccatgggatgggccccaggtagagttctgggtatctagccatggacaagacaaaccaagtgttttatctgaaatttctcttatgcgtttgtttgtctcttctcacattctggtggaagagacagaggaacaaacacataagagaatgctaagtgctgtgaagaaaaattaagcagggtcaaagaggtgtctattttagcaaggaatgccctttgagggggtgatgtttgggcagagacccagatgtagtgagaaaacgagacatactgaagtctggaggacaagcattccaggtggggggaacagcagttgcaaaggccctgaggcctttgcacttggtacatctgaggtaaggaggagctggtgtggctgaagcagagtgagcgaagggggcagtggcaggaggtgaggtcagatcatgccagaaccacatcttgtatggccttataagccctggaaagggagctggattttcttttctttttcttttgtttttttgagacaagagtcttgctctgttgcccatgctggagtgcaatggtgtgatctcagcttactgcaacttccgccttctggtttcaagcgattctcttgcctcagcctcccaagtagctgggattacaggtgcccgtcaccatgcccagctaatttttgtatttttagtagagacaggttttcaccatgttggccaggctggtctcgaactcctgacctcctgatctgcccacctaggcctcccaaagtgctgggattacaggcatgggccaccgcaccccgtctaatttttgtatttttagtagggatggggtttcaccatattggtcaggctgggctggtctcaaactcctgacttcaggtgatccacccgcctcagcctcccaaagcgctgggattacaggtgtgagccaccgtgcctggcctggattttacttttagtgcactgggaacccaatgggatgttttaagcaggagagtagtgaaataatgattaagagctaagtcactcaccttcaaatcctggttccccccatttatcagctatgtaatctcaagcaaattatttcatctctccctgcctcagtttcctcatgtataaaatgggaataataacgatatacctagctgggcaaaccggtaaaaacatacttggctcacacctataatctcagcactttgggagtctgagatgggaggattgcttgagcccagtagttcgagaccagcctgggcaacatagcaagacctgtctctataaaaataaaaaaaactggccgggtgcagtggctcacgcctgtaatcctagcactttgggaggcagaggcggggcagataacaaattcagaagttcgagaccagcctggccaacatggtgaaactctgactctactaaaaatacaaaaattagctgggcatggtggcgggcacctgtaatcctagctactcgggaggctgaggcaggaaaatcatttgaacccaggaagcggaggttgcagtgagctgagatagcaccattgcactccagtctgggcgacggggtgagactccatctcaaaaaacaaaaaaataaaaaaataggctgggcatggtggctcatgcctgtaatcccagcactttgggaggctgaggcgggcagatcacctgaggttgtgagttcgagaccagcctgaccaacatggagaaacccccatctctactaaaaatacaaaattagctgggtgtggtggtgcatgcctgtaatcccactattcgggaggctgaggcaggagaattgcttgaacccgggaggcggaggttgcagtgagctgagatcgcgccattgcactccagcgtgggcaacaagagcaaaactctgtctcaaaaaataataataaaaataaataaataaaaataaaacaataaaataaaataaataagccaggtgtggtggctcacacctgtaatcccagcacttcgggaggctgaggtgggcagattacctgaggtcaggagtttgagaccagcctggccaacatggtgaaaccccgtctctactaaaaatacaaaaaaaatagctgaatgtggtggcaggcacctgtaattccagctatttgggagtctgaggaaggagaattgcttgaacccaggaggcagaggttgcagtgagctgagatccagccattgcactccagcctgggcaacaagagcgaaactccgtctcaaaaacaacaacaaaaaaaaacttgtatcacagagtggttataagaattaatgtgtttatatatgtaaagtacctttcaatgaccaaaatacagtatgtgcttcataaattataattttatttattgctttttttttttttttttgagacagggtctcactctgtcatccaggcaggagtgcagtggtgagatctcggctcactgcagcctcgaactcctgagctcaagtgatcctcccttctcagcctcctgagtagttgggactacaggtgcaagccactgcacctggctaatcataaattacagttttgttttgttttgtttttttaaaaaagattccactgttaatattgtccttgtttcataaatgaggaaattaagcctctgagtagttaagtgatcggcacaagttcacacagctaaagacgaccgagctagaattcaacccaagaccctaattctgaatccagtgcccttcccacgtaaagagaggactgaccaccctacaggttaggagctggcagggaggaaagcccagagtcccttcccttttcatctgtgctccttctaatctgtggggactgcctgtcccaacccgagaatcccagcaagagcagagccgcctctgcctacactcacccgcgccgcaaacctggtttcttttcttttcttttttattattattatactttaagttctagggtacatgtgcacagcatgcaggtttgttacatatgtttttttaaaatttttttattatactttaagttctagggtacatgtgcacaatgtgaaggtttgttacatatgtatacgtgtgccacgttggtatgctgcacccattaactcgtcatttacattaggtatatctcctaatgctaccccttccccctccccccacctcacaacaggccccggtgtgtgatgttccccttcctgtgtccaagtgttcttattgttcaattcccgcgtgttctcactcataggtgggaatttaacaatgaaaacctggtttcttttctagactccgcagcagtggccactgctcaggacgcgctctcaagggctccccctgctgggatactcgggagctgcaccttgctagagttgagtgtctctgggccttctgtccataagtcaatcaaattccttccctgggctgcaaatacctgtactacaatctgaagctggaaattgtatgtgagtgttgcgtgtgtctgtctgttgtgggtagaggggtgtgaataaaataaccacatgttttacatatttattctagaaaatatttttatttttaaaataattctaaaacttataaaaagtcatacatattaggaagaaaagtaatatgaattcatgattttaaaaattcaaacagtagaaaagaatgcaaaagaaaatattttcctcccaccccagaccctgggtctttcagtcctccccagaagcaacaactctgatcagtctcctagatgactttccacacaatatagtaacatcagctttttaaaaactttattaggcagggcacggtggctcatgcctgtaatcccagcactttgggaggctgaggcgggaaaactgcctgagcccaggagttggagatcagtctgagcaacatggcacaagcccgtctctataaaataaaaaaaaaatttaaacacctttttatcgatgcatgatattcataccaaatatatttgattataaaattaaatcatgttcattgtaaaaatattcaaataataccaaagtttataaagttaaaagagaaagttcccctctcccctcacaccccaatctctctaatcacaggaaacctctctaatcactggaaaccttgttgtcattcttgagctcagaaatctcagatccttgctggactcctccactcctccttccctccatctaattctaattcccactttgtgtataagaaccctagctggtaagtactgttatccccatattgcagctgaggaatttgaggctcagaaagggaaagagggttgctcaagaacataaggcaagctggacgcggtggtgcacatctgtagtcctggctacgggactttttgtttttttcaaaaaaaaaaaaaaaaatatatatatatatatagttaagggcccccccgactttttttttttttttttttttgtctcactctgtcacccaggctggagtgcagtggagcaatcttggctcactgtaacctcctcctcacaggttcaagcgattcttgtgcctcagccttccgagcagctgggatcacaggtgcacgacaccaggcccggctaatttgtgtatttttagtagagacagggtttcgccatgttggccaggctggtctcaaacttctggcttcaagcgatccacttgcctccacctcccaaagtgctgggattacaggcatgagccatcaggcctgaccaagggcccatttttgaggaaggagaggacctggtcctgtgggaactgtgactggacatcctttattgcccaagccctgagtgatagtgaaaagatgtcatccacttcaagaatctcaagcttgggtacgctggtcacttcgagcctgacttagtgagtgagagggggctaggactggaataagaactgcctactgaggcggggtcaggaccagggagaaaatatccagctgacaaagggaatccaactagggagattgacacaattcaaccagatggtggcatcagcaagaggagtgtccggcattcctaacacatcccatgctctagcatgctgctgtgcctttgcacatgctgcttggaatccccgccaccaccccacccctgccactttgcttagcatttttttttgagatggggtcttgctatgctgcccaggctggtctcaaactcctaagctcaagaggttcttctgactcagcctcttgagtgggtgggactacagccacatgccaccatgcctggcttgtctgcttagcattttttttttttgagacagggtcttgctgtgttgcccaggttggagtgcagtggcttgaacacagctcactgcagcctcaacctcctgggctcaagcgatccttcctacctcagcctccagaatagttgggactacagtagtgcaccaccacacctggctaattttagcgtttttatccttcacaaacaagtcatagtggcctgatgctgtgtagccagctgctccctctttatagaatttactacactgtgtgtgtgtgaactatttctttacttgcttgcctgccatgtgagtttgtgaacagaggctctggacagagttcatttattattgttctttgggtccctcccagtgcataactcaacttttggcacacagtaggtgctcaatcaatattttaaaaataatgaatgaatggaacttcagcgcggcagctcaagcctataatcccagcactttgggaggctaaagtaggaacattgcttgatgccaggaattcaagaccaacctggacaacacagtgagtccccatctctacaaaaaaatttttaaacaaattagccaggactggtggcacaggcctatagtcttagctactcgggaggctgagccaggaggatcgcttgagcccaggagattgaagctgcagtgagctatgatcaaatcactgcactccaacctgagtgaaagagcaaaaccctgtctcttaaaaaaaaaaaaagagagagagagagaatgggccgggcgtcgcggctcacgcctgtaatcccagcactttgggaagccgaggtgggcggatcacttgaggtcaggaattcaagaccagcctcgctaacatggtgaaaccccatctctactgaaaaaaaaaaaaaaagctgggtgtggtggtggtgggcgcctgtaatcccagcttctcaggaggctgaggcacgaggatcacttgaacccaggaggcggaggttgcaatgagccaagatcgtgccactgcactccagcctgggctacaaagtgagactctgtaaaaaaaaaaaaaaagaatggactcagaggaacagcagcaagagactatcgttttggtgctccagactgttaccttgcagtgagaaagaaagaggaaagtggttgactttttttccctctatttttccctctctgtcatcctcagctcactttagtcactcaacatgtctccatgttaacatggagaggaagatgggggtgggaaaagtcttctttgaaccagtgtaatagctggcttagtgctttctgggcctcgcagatgtttatagccatctctatccatcatcaaagcatcatggggtgcttttatacactcttcaggggttccctactggcccctctcctgcagttcccttagcaaaggcatctattaatggccatttgtctagcttcttgttcctggggtccctttatacctccaggaagccctactgaacaggacctaatagtcagcaggcttgtctcttcttgctagagttcacaggcaggaagcatatcctggtcacgatactccctaagtgcaatggtatggattctgcatctcagattctcatggaagccccctctcctagtcacttggtttgagcggttaaaagtaatgtcctcttaatcttccccaaggaggaatggggactcatagccagaaatatctccacacaaattatctatcctccacctgcagacccctttatattgggataagggatttaggaactttcaaacagattttagactaacagaaaaaaaaaaaaaaaaaaaaaaatatatatatatatatatatatatatatacacaaatatatatgtagtgatttagcacctcattttgaaatttcacatacatatatatatatattttttaattcagttagtccagacggcctcttggcatgggctaggaggaatatgtataaataatgagcaaggctgggtgtaggaaagatccatattatagccctcagagagggtttgagtacaaggcatatttctagagatggaatttaggatataaaggaagaaaccgttcccctcacctggcagggaccagggttgattttctttcaactcatccattgcctttccctccaatccagcctcctttgagaactccccagtctggttcatcagacaggtctgaacatgatcagacttgaattgtctggtttaagtctttataggactcttgggccccaagccaggtgataggtaggaacacctgtttgtacgtctcaaatgctccatgcagtttgcagaatgcgttttttttctgtttttttttcctttttttttttttttcgagacagggtcttactcctgtcacccaggctagagtgcagtagggccatcacggctcattgcagcctcgacctcctgggctcaagcaatcctctcacctcatttttttatttttttgtagagacaaggtctaactatgttgcccaggctggtctccaactcctgggcccaagtgatccacctgtcttggccttctaaagtgctggggttacaggcgtgagccactgcacccagccatctgcaggttgtgtaagactgatgtggtgtactcttatgcctacagaaccactagggcaggggtttctaatcccccaggccatggactactatcagtctgtgacctgttaggaccctggcagcacagtaggagttgagcagataagcgagcattaccacctgagctccacctcctgtcagttcagcagcagcattagattctcataggaggcaaatcttattgagacctgtgcatgcaagggatctaggttacacactcatgagaatctaatgcctgatgatctgaggtggaagtctcatctcaaaaccattcccacccacccctgcccatccctgtttcacacaccagctaattccactttgggctttggctcagataatatccagttgtactacattattatgttttaatacaatttccaacttgtccttactacattgtattattattcaatactagaacataatcaatgctcaataaatgtccactgggtaaatgaataaataagggaatgaatccccctttacaaacatcaaagattactatttggtttggtatatcttggtagtctgaaacctgtttactcctcatagtctttttctttgagatgaactttcgctcttgttgcccaggctagagcacaatggtgcaatctcggctcaccgcaacctccgcctcccgggttcaagtgattctcctgcctcagcctcccgagtagctgggattacaggcatgcgccaccacgcctagctaattttatatttttagtagagatggggtttctccctgttggtcaggatggtattgaactcccaacctcaggtgatctgcccacctcagcctcccaaagtgctgggattacaggcgtgagccaccgcacccggccgactcctcatagtcttaaaaaatattgtctagtttgctaatggatgttatgtcattaaactttgtaacactagggctgacttgattcattcattcaatggacacttacttgatacctaccatgtgtgtaagactgtgctaaatcccaggaataagtctcctatccacacaaagcttaaattttggagggaatgttaataggaaaacaaaataataaatggaaagtgctatgaaagaaacagaagacggccgggtgcggtggcgcatgcctgtaatgccagcattttgggaggctgaggcgggcggatcacgaggtcaggagatcaagaccatcctggctaacacggtgaaaccccgtctctactaaaaatacaaaaaaattagccgggcgtggtggcgggcacctgtggttccagctattggggaggctgaggcagaagaatggcgtgaacccggatggtggagcttgcagtgagccgagattgcgccgctgcactccagcctgggcgacaaagcaagaccccgtctcaaaaagaaaagaaacagaagactatcctagaaagtatagggtattactttagatagcatggtcagggaagacctagttgaggaagtatcatttaagctgggacctgaaggacaggaaggtaccagctaggccaagagctgggggaaaagtggtctaggtagctggcatagtgtatgcaaacgccctgaggcagaaaagagcttgatgtgcataatatttagattgtttcatttgtatttcaaatattgttgcagtgaacattcaagcacaatgcctgttgtgggattatttccctaggatggaatcccacaccactgcttctttgcatcgttttctctgtctagtgcctggagatgttccttttcccctctctagatagtttgcctttcagaatccgtgtccttccttccccttttactctccactttctctatttctcaaattagctattaagatcttttttgtgttcttacaggagaaagataaaatatagcttttaagcgttcctttctcaggttacctttggctgtggattaacctgaagccttgctgtttcactcgagctatccactcattcacccattcactcagcacttattgagcacctattttgtaccaggccttgtgctgagcgctatagtcagatgaccaaattacagtctctacgctcaagctcacaatctcatgcagcgcttcctaaaacgtgttcccaattatcagaatcaccctgggtactttctaaaatgcagattcctggactccacccccggtttagggattctctgggggtggaaaccaagagtctgcatttaccagttttgtttttaattcctactaaaaattgagaaccactgagtgcaagagtgaggcaggtaaatggagtttacaactctaagaaagtgcattaacaatttatacacaaggccgggcgcggtggctcacgcctgtaatcccagccctttgggaggccgaggcgggaggatcacgaggtcaagagagatcgagaccatcctggccaacatggtgaaatcctgtctctactaaaaatacaaaaattagccgggcgtggtggcgggcgcctgtagtcccagctactcgggaggctgaggcaggagaattacttgaacctgggaggcagaggttgcagtgagccgagatcgtgccaatgcactccagcctggcgacagagcaagactccatttcaaaaaaaaaaaaaaaaatttatacacaaaatgctacaggaataacgcatgggtcctattgggaagaaaaagttctctagaagtcaggcttaagcagaactgcagctccgggacggattaagtcaggtaaaggtaacactctgtgcagagacatgcagacaaaaccgagtgttgagtaagtaactcgcctgtaagtgttatgctgcctgaagcttctcggagcgtctgagcagcaaggtgaacaaccctcagaaaccggtcgcgctgccagtattatcgctaaccagtggcagcgagcccctttgtttctcggcagttgtaattgtagtctggtttgtaggtggagctgtgcgcaggcgcacctagaaccaggtgaccttgcacatgcgctgtatgtaacactgaagccaaaagcgaaatgattgagggcaatttttcttttctgcttccgaaatgtccctttcgcgaatccagagaccctgaccgtccccatttctggctagggatcttataattcttaaaataataccccctttccttcagggcctctctagtaagtcggctgccaatacccaacatggcgggaggccctgcgccggctcagtctgcctataggtgcaggacttggaggggcgggcccctcccaaagggcgggagtttgggggggcggggcctggccctctgcctcggggtgggctccgcccccgtcccccgcagggccttagcagcggctgccgcagctcaatcgcggagcaactagccgggcgtctgcgggagccgagcgtggtgaggtggggcctcaggggcaggtgggaggtgctcgggttaaccgtccgaggcccggagacccgcccgtctagggcgcctgagggaatcccgttcgggcagcggcctcttgttacccgggaggaacccgaggcccagagaggggctgggacgcgtcgttagggcccggggcccgcttgcctcagcttcttgctgccgccagcacgctaagctccagtcggcgccgaaggagagcttcccgaccctcgtgtccagtagccgcaatcccaggctgggagggtgaggcgccgcgctctgccgcccccccgcccctcgctccctgtgtcctggcggatttgcacgtaatctatccgaaagcccagtcccacccgccacccgactctggagctcccattcttcaggaccctgctgaagtatcgcttctcagccgccttctccaggcgcagctgcattcgcttctcggtttttgcactcgctgtgcaccgagttactttcccggcccctcgttgacaccgtaagctcgttcgttagatgttatgccttgcctttttcatctctagatcccagggcctagcacgtgatgataatagtcatggcttactgtacggaatgatcacaaattgtcaggtgctactgaatgcattacacataagggcccatttatttatttatttagagacggagtttcgcgcttgttgcccaggctggagtgcaatggcgcgatctcggctcacctcaacctccgcctcccgggttcaagcgattctcctgcctcagcctcccaagtagctgggattgcaggcatgcgccaccacacccggctaattttatgtttttagtagagacggggtttctccatgttggtcaggctgatctcgaactcccgacctcaggtgatccgcccgcttcggcctcccaaagtgctgggattacaggcgtgagccaccgcgctcagccaaaggcctatttaatcttcccaacaatcctatggggtgagttctttctatagcttcacgttttacccatgaagaaactgaggtattcatagaaaaagtaatttgccaggagtcccacaactaataagtggatggagctgggaaactgtccccagggcatttgatgacttgactagattgcctttgggtttaatcaacgtctgttgaattgatctttactttggccctgggagttattggaggctaggcttgtgatcagtattttaccgcgaaggcttagaaaggagaactggtcccagatttatagaggtcacaacaaaaccaaggctactggtacgccctctgttcctttagttcttctatctttctttgctccttttcgatcagaaagctgcagacataggtgtcattatcgctcactatttaagaagtgcccctcacagagctgtgagttcgtagtccatgctttaactaatgtaatgttcatgctttaacagctaatgtaatggagagagtgtagaatttggaatcagattggggttcagtcattgctctgccactgaccaagctataagttatatgcctccccccacttttttttttttttttgagacctggtctcagtcacccaggctggagtgcagtggtgcgatctgggttcactggaacatcctgtctcccaggttcaggcgattctcccgcctcagcctcctgagtagctgggattacaggcgcccgccaccgtgcctggctaatttttgtatttctaggagagatggggttttgccatgttggccaagctggtctcgaactcctggcctcaaatgatctgcccaactcagcctcccaaagtgctgggattacagttgtgagccaccacacccagcctgtttttttgctttttatataggtaatagagctgttagcattttgcaagaccattggtgataatatggatcatgttacctaatgtcctataatagtcagtaataatgggcacttgttataaaccaggctgtgttttaggtaggagctgggaatacagcattcgataaaacaatgcttttgcacttgtggaatttgcattttggtaagtatattacataataattagatagggacagaaaaagcatggtaaggtaaataaaagtactagtgttatgtggagaggtgatagtattttatttatttatttatttgagcatcttgtcccaggctggagtgcagtggcgtgatcacagctcactgcagcctcgaactccttggctcaagcagccctcccaccttaacttcccaagtagctgggactacaggtgaatgccacacagccagcaatttttttttttttaatagagatgggaatctccctgtgttgcccaggctggtcttgaactcctggcctcaagagatcctcccaccttggtgaaactctgtctctactaaaaatacaaaaaaattagctggtcgtggtggcacatgcttgtaatcccagctactcaggaggctgagacatgagaattgcctgaaccggggaggcagaggttgcagtgagctgagatcatgccagtgcactacagcctgggtaacagagccagatcctgtctcaaaaacaaaacaaaacactggatgagattaccttggaaattaatggagatggagaagaggtctgaagccttgaggtttccaaactttagatactggggagatgagaaaaggcagcaaaggagactgagtgggagaggccagaggttggaagagagcaacagagaggccccacatgagatttaaataaggagctgcatgctaatttgtttttttcaggagtaagaaacaaattatgtctgtacacaaatgtctatactgtagtttctttctcagtaaataaaatgtttgtgtcctcaagtatttttctgtttttgctttaagtgacaaattctatttaataccattctgcatcttagtccttgtagcatttatgcctctattccaagtttaggtggtagtgttgcttctcttttaaactttatttaaatactccttttgtagtattttggatgagagaggatcaaatacataatttatctcactcttctgtcactttccactccaggttcacaggtggctgttggtctttagtaagggtgctgtcttccctgtctgatccttagcaaaagtaggaaggtaggtcttgttcatttctgtaccactgtggcagactcctgatactgagttgaaattcatgagtgtttatgggataaattaatgtacaaaagaaatgaatctttccctttttcctgcagtaatgataacattggctcagtggtttacagcttagaagtacactgacactcattatcttatttagatgtaatccaatttgttagtttgccagctactgctcttttccctttctcaggcacattgaaatttactttccctttgggggctctgctagtttattcctagcagatctgatctggcagtgtgtttgtaaaaggatgctgaactgtgtcttgaggaagctcagaatgaaatctgaatttcagaaagattcctgagataatttttctctgtctcttctcttttattcttgttttaataaattttagttttatgaggattgttttggttttaaaaaactttaaatcattttttaaaactattttttacaacaattttagggttacagaaaaattgcatagtacagagagttcctgtataccttgcacccagtctccccttttagtatggtatatttgctataatgcaaatcttttttttttttttttttttttttttttgagatggagccttgctcttgtcgcccaggctggacagtgttggccaggctggtctcgaactcctgacctcaagtgatccgcctgcctcagcctcccaaagtgctgggattacaggtgtgagccactgtgcctggccatgcaaatcattttttgagataagtggggcatataaaaatataaacaaaatgaagttgctttatctctacaagcctcagtttccttatctgcaagatgaggggggtggactaaatttctaaatagctttaaaattttttaattatctgctaaagtaaaataattatataattgtaatataattttctttatttgcttaagtattactaataccaccttgccaaatcatgtttgcaagttactgacagccatatcctaaaagaaaacttaatgagaattcatggaactatgtgtggcaggactgcttattagagatattaggttgaatgatgtgaaattgccatttttgtagataaaaagtaatgagtgaggctgggcttggtggctcacacctataatgccattgctttgggaggcttggaccagggggtggctgtctgaaaccaggagttcgagacaagcttaggcaacatggcaaaaccttgtctctaccaaagaaaaaaaaaaaaagcctcggtggcacacatcttcagctcctctgaagggtgaggctggaggatcccttcagcccaggaatttgaggctgcggtgagctatgattgcaccactgtactccagcctgggtgacagagctagatcctttctctaaaaataataataataataggataatattagcaatttcatatggttcaacctaatgttttgggatagggattcaacaaagtgtgagggggcctttgagacctcataaactcccactgcatgcaaaagcccggctcagccctcaccatactaggagagaaaaggctcctcagttcccttggagtaacttggatctacattattgtaggtagagttgttggcagaaatcctgggataagagaatagtttcctggaagatctgtgcctccaaccagcagagagggattgagcttcattgaactcaacagagccaacatttcatagcaccatggtgagttggtcacacagccttggcaaaaaggctgaaaaggagggtgtaatagtatggggaaaggttgtattcccctggttcgtaggctaggaagaggcctggagtactggtgccaccaaacctttattggtgccattctattctccctactttatgcactttccttactgcctagtacaggctctgcaaactcaagtatcttcggttgttcaggaggtaatgtaaattagtaagccgagttttcctctttaatgctactataacagaaacaatagcacagttgcaatgataaatgacaactgaaatatgctatcattgtgagggagagaatcggtgtgtgcataggggaggccatgatgaactggagagcacatgccctgtctaaagggggcaggcactatacaactgtgcagagcacacgccctgtctaaaggagacaggcgctgttcaactgcacggagcgcgtgccctgtctaaacgggcaggcactattcaactgtgcagctggttgttgccttattgaaatatgggtcaagcatcactgggtattctgattttccaaaggagccagaaatatggattttatgtacattctcccaatgataaatgttggcacctaatttgaattcttaaaaactattatgtgggccacacaatggctgaaaagagctagcagggcactgatttgtcatctctggcttatggcttagctctgccaggagtgaggctcacatgcatttcttcactggacattgttgacaagttacaattaaaatgaattagacagctcctgcctttgaggtactcatggattagcagagaaaatagacaagtaatgatgataagatgtagagtagacatcagaacatatgtattctctctgtgtatatagctataaaagtgactaactcttcctgggttcatctgggaggacatgataggacgtggcatttgagccaggatgtgggaaatcaatagtttggtgcattaaagggatttggggcccttgaaatttctactgtatgtgcaaatgttaggtttgcattcgctgtatataccattttgttgataggtagttgaaaatacggatattccttagccctgctggtgagagtcttagggttaataaaatgagagaactcttcctctggcccaggttatgggataattgtgtgttttagaggcctaagtaactcagaggtcatgataccctcatttctggatgagggaagtagcacatctgaggtcacagagcccattggaggcagagcttggactaacacccagaactctttaccaccatgccttcccctgtcctgggtatctctgatgaaggtcaccgttaggctggccgcctctgcctgtggtggcccattgccctgttttggcccagctcctggtgggtgagggggtttggccatcctgctgccactggttccttctctcttttggatcctttgcctgaaatgcctgctaccccttttctttgtcagatagactacttgtgttcaaatctctctcaaccatatgccagctgtgtggcctggcacaagttttttaacctttctaagccccagtttcctcatctatatataaagagttataatagtacgtttggtgaagtgtaatgagaaggcattggaaggtttcaagatttttgtaaaaacaaaatgacgtaatgcatgtaaagcacttaaagcaacagccctccagaagcactcagcaagtgttaacaatgatgatgatgattcacacagttcacaggctcccaggctgggttctcttcctttgttttctcatattatcttattatttcacatgctacattgtatgtattgtaatagtttgtgtctatttcccctgctagactaagaacaccttcagcgattcattcaacaaatgtttctgaaccactgtgccaggaactaaggatgcagtgataaaccaggagctcttggtttagtgcagagttccaaaagtcatgccaggagacactagtcctgtgagcttgtctcatggtcagttaaatttggggaatgatgctcatcatagcgcccttcagagatgagggtcccttttagtattttaaaggttctgaggagtcttgtgtgtagtaaaagaacagtcctttccatttgactatgtgctttggtccccagttcaagaggaggttgaagtggcatggcaatggttagagaccctgctgggcgtgaacaccctctggctacctagggacctgtgggcctaccacctggtgccctcatggagacaagaagccctgggttgaacaacatgaagccccagtcactgcagctggtactggaagagcaggtgctggcactacagcagcagatggcagagaatcaggcagcctcctggcggaagctgaagaactcccaggaggcccagcagagacaagcaacccttgtgaggaagctgcaggccaaggtgaggcagctgcccttttggggaggggaaagagaacaacccccagagctaggtgctgaggtgagataagggttgcaggaggcagagtcttgtggtgggagtggcctacatctagcatggtgagataagacccagaccttctagctttcatgtacagcttctcttttgatgctcacaactgctccatgaggtacgtattatatccttttaatttaattttatttttgagatagggttttgctctgttgcccaggctagagtgcagtggtatgatcacagatcgctgcagcctcaacctcctgggctcaggcagtcctcctgcctcagcctctggagtatctgggaccacaggtgtacaccaccacttttggctaatatatctctttaaagatgaaattcacaagggttaagttaattatccaggtttcttcagctagtctagagccaaagcccatgatcttgcctctgtgatataaaaggcatatagaaagtatttatttatttatttatttatttttgagacagagtctcgctcatatagaaagtattatttaaatgcccaaataaggccaggcacggtggcccatgcctgtaatcccagaattttgggaggccgaggcaggtgtatcacctgaggtcaggagtttgagaccagcctggccaacatggcaaaaccctgtctctactaaaaatacaaaaattagctgagtgtggtggcgcatgcctgtaatcccagctactcgggaggctgagttagaagaatcacttcaatctgggaagcggaggttgcagtgagccaagattgtgccactgcactccagcctgggacacagagcgagactccatctcaaaaaagaaaaaaatgcccaaatagaaactataagatgttatggccttaccttactgtcaccacccatttcccctgttcatagcaagtttgcctaagatcctcaggggcctttgctttgggctgtttgtgccagctgtgttcattgcccagggcctgttctttttgctgcaggtgctgcagtaccgaagctggtgccaagagctggagaagcggctagaagccactggagtgagtgaggctgagctctctgcaccccctgggtcctcagtgaatatacttgttaggtttcatttgttgactgagggaggttggagtgtacaagtgaggtgtttggtggaaggctctctttctcagcctctgagaggtttatcacactgatatcttcattggacctagctggcctgtcagattccaacccttggttttcaaaggacgaaatgtaaattagattggaaggagtgtgggattagcaggaagaagtgcatgtttcctccagcaggtgtcagtgtttcttttagaaagatgcaggcctttgcgagcctacagcatgtctgcagcaaagggatgtctgtgctattagaactggctttgaaaaacccatttatttgcctttgttccagctgcctctcagtacctcctcacattttcctcagaaaagttctctcagaggaaggaaagaaccaaaacttattgagcaccctcaatgcagtccaggcagcatgaggcactgtcatatacagatggtcctccccaacttaggatggttgcaagttttcaactttatgatgatgtgaaagctatatgcattcagtatgttccttgggttatgatggggttacagctggataaacccattgtttggggttgttttgcttgcttgtttggttggtttttgtttgtttggttggttggttgttttgagacagggtcctacttactctgtcgcccaggctggagtggactggtgcagtcatgagtcactgcagcctcagcctcctgggcttaagcgatcatcccacctcagcctcccaaaaagtagctgggactacagatacatgcctcaacatctggctaattttctttattttctgtagacacagggtctctctatgttgcccaggctggtctcaaattcttagactcaagcaatcctcccactgctgggattacaagtgtgagccactgcatctggcccgaactcactgttaagttgaaaatatcataagttgaaaatgtcagccaggcgcagtggctcatgcctgtaatcccagcactttgggaggtcatggtgggtgggtcacaaggtcaggggttcaagaccaacctggccagcatggtgaaaccccatctctactaaaaatacaaaaaattagccgggcatgatggtgcgtgcctgtaatcccagctactcgggaggctgaggcaggagaatcacttgaacccaggaggcagaggttgcagtgagccgagatcatgccactgcactccagcctgggcaacagaactagactgtctcaaaaagaaaagaaaaaaagaaaacgtcgtaagttgaaaacacacctttaacttatgttcaacttatgatggatttatgggatgaaattccagcataagtcaaggagcatctataattgtgtctcttaacctgcacagcaactttctgaagggaacgatataccgctttcattttgtagctggagacactgtagctccaagaagttaagtgacttcacaggctgggtgtggtggctcatgcctgtaaccccagcactttgggaggctgaggtgggtggatcacttgaggccaggaattcaagaacagcctggccaacatggcgaaaccccatctctactaaaactacaaaaattatccaggtgtggtggcaggtgcctataatcccaactacttgggaggctaaggcaggagaatcacttgaacctgggaggcggtggttgcagtgagctgagattgtgccattgcactccagcctgggcgacagagcgagactctgtctccaaaaaaaaaaaaaaaaaaaatgaaagaagttaagtcacttcccaaggtcaaaccgttagtgtagtggaagttaaggccattagtgaaagatacatcacttcttaagttgaagattctatttactactgaaggccgtctttcaggagaggtcatcagtttacttttggagtgagggatgcagtgattgagaatagaagcatattgctaacaaaggggagaaagaataaaaagaaagtggactgccatggaagggagccttagggaactggtctgagtgatgttctctttggaggtaagtaaggcttgtctctgtctggcgcagggaccaatcccccagaggtgggaaaatgtggaggagccaaacctggatgagctgctggtccgattggaggaggagcaacagaggtgatggaccccaaactttctgacctgggtgattggccagttggtggagaaggctgatgggaaacttctgccctgagggctaatgtggacttcagccatagccctctaattcctgcaatggaaaatttcagtggttgccatcttactcccaggaggtccaagggttggactagacctttattttgcacccacttttacccctccccagtgcaggtgtgagagtctagcagaggtgaacacccagcttcgactgcacatggaaaaagctgacgtggtgaataaagcccttagggaagatgtggaaaaactgacagtggactggagccgggcccgggatgagctaatgaggaaggagagccagtggcagatggagcaggaggtaggaagaacggggactggaactgtgagaggaagcctgtgtattctggatgctgccctggtcagtactggaaggagttaacttcaggacttggatgaaaactgagctgttgctgttaaagtccctgaccatccttacctgcgcatgctggcagcctcagccttcttgggccttcagcttagacctgccactacccgcctagtctaggttctgctgggaggtagcatgacactcagagcaactctgttcctgcagcagtgacgagcttaggtttttgatggatctgaaagcttactgattcctggtctggaggtcttgcatatctagatgctaaggaggtagatatgaaactgaatgggaaagaaagagctgttatgggccctggggaattttcaggtcccagctgaaggaaacaaatgtttcctgcatttttgctttgtgctcagtggtttatgtatatcattgactcctccttagaaaagtctgtggtaatagatcccatttgttaagcagctaccgtgtatccttttctaatctggcccagaggaaggcgatataccatcctaggccctctgacctctcgaatcccactgccagctttattaagcccttcaccataacctggatagatacccattcataaactatctcctgtaagtccctccttccttccctcagtagtcaggaggaatccaagactcttgtgttggcaaaagatagccctctgcctttgggtatgacctgggtttctgaacacacagttcttcaagggctacctgaaaggggagcacggtcgccttctcagtctatggcgggaggttgtgacattccgacgccacttcctggaaatgaagtcagctactgacaggtcagtgtggggagaagaagggaggaggtttgcccctaccaattctggactaataacagtgggctgctatagaagcgggatcagctgtgggggtggggtgggtgggggagttggtagtattggaagcagatgatttttcccagccctgctcctcaggcttcactgggcctgatcaccacactccttccctggttcctagtggagtctgctgttttccttgcttgtactcagagatctgatggagctaaaagctgagcatgtgaggctttcagggtctctgttgacctgttgtctgcgcttgactgtgggagcacagtctcgggaacccaacggatctggaagaatggatgggcgggagccggcccagctgctgctgctactagccaagacccaggagctggagaaggaagcccatgaaaggagccaggagttaatacagctgaagagtcaaggggatctggagaaggctgaacttcaggaccggtgagatggcctggggtcccaagaagggttcgctgagagagagctgactcctttagagggttagggacaggcagggggaggtgccaggaacattcctaccatggagggggagaagatgtgcccaaggaaatctactttgaaacctgatgccacagttggggcttgtactgacctctgccctcagcctgtcttttagcccagtttctttcctgttgatttatggagctagctatgactccatcctccatcaacaccaaagtgcttgccattcccagaacagccaagctcttccccctccctgtctttgtacctgctgaatttagtctggaatgcctccctcccttctctctctgccttatcctctaagacatagttcaaatattacctcttttttttttttttttttttgagacggagtctcattctatcgcccaggctggagagcagtggcatgatcttgcctactgcaacctctgcctcctgggttcaagtgactcccctgcctcagcctcccaagtacctgggactgtttacaggcacatgccaccatacccagctaatgtttgtatttttagtagagacagggtttcaccatgttggtcaggctggtctcaaactcctgacctcaagtgatccacctgcctcagcctcccaaagtgttgggattacaagcgtgagccactgcaactcgccgaaatgtcacctcttctatgaagccttctctgacctcagtagcctgctaagttactgtgcccttgtagtcttttgacctcttattacagcattgatctcactgatgatttagtttcccctaccttctttttttggtgaggctgttttactttttggattataatgaagtaggtttttaaaaaataatgacatagaagggcagggaaatgagcagagagccccattgaatctcaggacaaagttcatatatgcccatgacgagggttgtatcttcacctgttggaggtacatacataaaatgcagggctattttgttttgtttttgcttttggaggcactgagaagtacaaaagcaggccatgtcttcgtaagtttttatttctagtactttgtacttcacctgccgtatactagacactcaatacattttgtttctttgttttttgagacagagtctagctctgttgcccaggctggagtgcagtagtgtaaacacagctcaccgcagccttaacctcctgggctgaagcaattctcttgcctcagcctccaaagtagctgggattacaggcacgcaccactatgcctggctaactttttaatttttttgtagagacggggtctcactatgtttcccaggccggtctggaactcctgagctcaagcagtctttccaccttggcctcccaaagttctaggattaccggttgagccaccgtggctggccagtgaatgtttgttgagtgatgcaatacttaaacaaatgaccatacagtgtgttaaggttcttagagatggtatagaataaaattattaagacttttgctgagtgaggaggatcacttgagcccaggagtttgagaccagcctggacaacatagtgagaccttgtctctactaaaagtaaaaataaaaaaagaatagccatgtggtggcatgcacctataattctagctacttgggaagctgaggcaggaggattgcttgagagtgagctatgattgcaccactgtattccagcctgggcaacagagcaagaccctgtctcaaaaaaaaaattggaaaaaaatttaaacttttagatagcattcattcaagaaatatttatttagccactcacataatagcaagcagtaagctctaagatatagtgttaagtgtttggtgattttgctggactttgagattaatatcaagaaggttgaacataatcttccccaaattgcccttcctttttccctatcagagtcagaacctcgggctggagggaccttgggactatcccaagtgcaattctgatgttcttattggcttcagggtgcttgacttcaagatcaagcgaggcctggaagggcctgggccagggctttccttcagctcttgggcccccaaacacgtgttccagccttgagatgtggtaaatccctgcatgtgtctgagtggttttttgcttccccacttcaaggctatagcatcatgtggtattcagggagtgcagacgggctgggggtgcctaagggatttgggggaggctgcagttgggagtggttggggttggggctggggctggggtgtgctgcatcgtagctctgtccacatccatgggctgttctggtgacagtgctatgctcttctctttagggtgaccgagctctctgctctgttgacccagtctcagaagcaaaatgaagattatgaaaagatgataaaggctctgagagagacagtggagatcctggtacatgatcctttgctctggaaaggagttgggcgtgggcttgtaggttccttgtgctttatggacagatagtgcaggataccagttacatattccatgatgaaatcctctaaagctaaaaaataaattttggctgaatctgaaaattaattaactcattcatttattcattgaataaatactattgactgtctactatccctactgtattcctggggaaattgcaatggcatatgtatgcagtgtgtccttaccagagaattggcacatacattcagagacacattggcaaattagtgagttaccaggaagcggatatgtggagagatttaaaatctagtcacatgggaaacaactgaggagtatggcaatgtttagccgggagaagaaagagcttgaggccctgtgaaggcccttgaagacatgatagctgccttcacatatctgaaggactgacgctgggaaaagagagtttatgaagggccgggcgcggtggctcacgcctgtaatcccagcactatgggaagctgaggcaggcagatcacctgaggtcgggagtttgagaccggcctgaccaacatgcagaaaccccgtctctactaaaaaaataaaaaaaattagccggtcgtggtggcacatgcctataaacccagctgctcgggaggctgaggcaggagaatcacttgaacctgggaggtggaggttgtggtgagccgaggttatgccattgcactacagcctgggcaacaagagtgaaactccgtctcaaaaaagagaaaagagagtttacatatttaatgttttccagggcaaaaccaatgtcaatagctagaagttaataggggaatagattctggctcacagctagagctgttaagtagttgaacagcctgtcttgtgaaggagtaaggttttggtcattggcttaacatctgccagggatgttatcagagggcttctctaaggttggatgttagaaccctctggcttaataccatgtttcatctctataagttttcagatctctgattttaggtagctcctgaacccctattcatatgtacacccctagtcttctcatccaagctgagatcaacaggaattgtagctttctgattccctctttttttttcaggaacttgccaattcagaatatccatggggctcagataatgtaaataaatgaaatgggttcagttgtaagaattctggttttccagtgctgtttgttgtatttagttttcagtactgcaggggacacttgagctcagtattaaggaagccatgaggagcaatagggattgtgggaccctcaataataaatgtctcatctagatgaggcatctaccattcaacttcagtaaatcgtttccatgtaggaatgggggctgggtgtggcccatttgttaactttttgggagaagccagaaatttatatttttatgtaaaatctttccatttataaatgttgattcaaattttgtataagccaaataaaacatagttgcaagtctgtgtctttaggtcttcactaacacaaataggaaggaagagaggaactcttgagtcttcaagattatgtctagctttggggctagaggattctctggtttagtattaggtctcaagcatccatttactgttcagagacagcacccatcccctatctaataatagtttacatttattgaacatttgctttgttccagacactatattgaataatttacatgcatttttcatttaagcctcaaaacaactagttgctgtaattatttctattttaaagaaaaagaagtaagtgatagaagctagtaagtgatagagcaggaattctaatctgtgaagtccaatttggaactcgtaatcacttaatctaaacttgtaatcaccacatcacattgtcttcagactcttcagacaacattagcattgacatatggtcagggaaaaagtggggctgatagaatagacagaatgagactttggttgtttggggtcctggaataataaattcacttttgagagtttggctctgaggctctgttctattccctgttcaggagacaaatcacacagaattaatggaacatgaagcatctcttagtaggaatgcgcaagaggagaagttgtctttacagcaggtgatcaaggatataacccaggtactgggaagcctcctgttcatggtaaccaggttatgcctccactccccaggtctccatgtcctttcagtcctgcctagatttccagtctctgaggttcgggtgcttaaagtcttgtggggatgagttttgtgtgtttgaagaccagaaccctaagagatagctaagcattcacgtttagcactacctgatgggacaggccctctttcctgtttctagctgcagttctcaggctggaggctagattctggtattcaatatctcaatcgtttcttctttcatttcctcatttattgttacctcagacagtgttctagccttgttgttagtcctagacttgggtgaccaaaggtggagagttgaaggaaccagacttttatgctcagatactcccctccttcccccaggggagaggacctgagaaggaaaacatcaggtttgtccaggctatagggttaagtccctctatagactctaggctttggtcagtagggtggtgaccttgctgtattgggtttcaggtcatggtggaagaaggggacaatatagcccaaggctctggtcatgagaactctttggaattggactctagtatcttctcccagtttgattaccaggatgcagacaaggctcttactctggtgcgttcagtgctgactcggagacgccaggctgtgcaggtaggaaccctcagcattccacctcagtcacaggggtttgtgtctaaactggtttgtgcctcaggtacctccctagcctggactatccctttcacttttttgaccagtcatgaggtgttctgtcaatatcccagagtaaatctgcctatgtctgctgaattgtgcttgtgagtagcaggcacatcctccacgccaatggcatgcttcactttgtgtacaatctttgcataacagtatgcaaagattgggaaccagagccctgggagattattgggtcaacgttctccaactctgagagtcttaggcacacttaccactcccccatgccactgtacatttggagatgacgaactctaagaatctagagccacagaagcccaatgacctctgatggcctgtcttcttgaatagttgcatctcccttctcagctttcttttgttgcaccagcccccgacccccttctccagccccactttcggggttctgacatccctcctttgcccttgttcatcatctggtttctcttgctctctctccacaggacctaaggcagcagcttgcaggctgtcaagaggctgtgaacttgttgcaacagcagcatgatcagtgggaggaagagggcaaagccttgagacagcggctgcagaagctcactggggagcgggacactctggcagggcagactgtggacctccagggagaggtggactctctcagcaagtgagcagacgggctgttcatcccaccctcccagcctggtctcagtctcagtcaccatccagccatttacccactcccatcaggtttttggggtgctgatcctgttctccttgagactcagggctgttttgcccagtgtttcacttgtttctccagaacaagcttttggggttggagtctttgtgatgataaaaaagtttcgcactagaaacagaagatgggatgttgaaacagggtctcttggccctgtgatgcctgcttccagaaagaattttaggtcctatggtctctgctcatctctgattcccttcttccagggagcgagagctgctgcagaaggccagggaagagctgcggcagcagctggaggtgctagagcaggaggcatggcgcctgcgaagggtaaatgtggagcttcagctgcagggggactctgcccagggccagaaggaggaacagcaggaggagctgcacctggctgtccgggagagggagcgtctgtaagtgagactagtctcctcctcgctgggccctggtctttcttcaattctacaccctccccgtctactcccctctgttacaaagtagagtatgtagaagtctggcatgcagtgggttcagattagcttgctgcttcttcctttgcagaaagatgaatatggaaagttcgtggttggttaagtcttagttgagcacccatatgggatgagacactgagggggatacagaaatgaataagacaaaagccctgatttcagggaacttgccagaagacagacaactcactgtgacatgaggctggatgaagtatgagttaaatagagtttcagaccaagtcctttgggagcacaggagtgacagctaattattgaagactaggaaatgctttatggaggagagagtagactttgagctgggcctttacctatttggttagcagagagtgggagaagagctcaaggaacagattagcaaagaaaaggcggcaggaaggttcatggcatgttcagagtaggctgggctggctaaagggtaagacttatacagggaagtagtgggaaatgtgctagctggtcaagaaagggaaatccagaatcaatggccccagctaatctgtaaattcccctatatgatgtcacagaaaaagcaaggactttgagctaggcagaagcttagtttaaattatggctctgtcacatggacagattatttgtagaatgatgataatatttaccttgaagggttgctgggaagatgagagcaatgttttggaaaacgccagcatagaacctggcatatggtaggtctttaataactgggagcagggatatatcttcatctttgctgtatttccctcctctcctgtgccccagttccttgtacctggtaggcatgaatagtggaagcttgaagggctgccataagggtcatgacttgtgctaagaatgatctccctgtaccaaggagaagggcagacaacccctaacaacaaaaaattagctgtagctgaatgtggtggcatgtgcctgtagccatggcaaggtgagatgggaggatcacatgagcccccaggagtttgaggcttcagtgagctaagaagatacacagagaagtctcactctcatttgtgctttctccatcccatttcccttccccctttaggcaaccattttagctgacttcttgtttatcttgccagtgctccttcatgcaaatacgggcatatattctttcttcccccactttcttgcataaaaggtagtgtatcatgtatatactgttctgcaccttgatttttttcacttgacatgtcttagaaatctttccttatcagtgtttatagaccatcctcattctgttgcatagcaaaggtgattatattcctgttacctttggggttatggcccatccctaagagttcctctagacccctctctttcccatcttagtcaggagatgctgatgggcctggaagccaaacagtcagaatcactcagtgaactgatcactcttcgggaagccctggagtcaagtcacctggaaggggagttactgaggcaagagcaaacggaagtgaccgcagcgctggctagggtgcgtggcctcctctcctcacttgctgggtgggcggcttcgaaagtgtgttcccatgcagcctgcctcattcttcaccttcaagccaggatccctcatctttcctcaatcattagtctgcttctgggttctctattccaacataccctctatattggaattagaatgggctttctaaagtatatacctggttatgtcagtctcttaaaaccattcaacggctttctagctctgtggtgccacattcaaagctttttgtcatgtgcctcaaagtgtgttttagcctccccttctactgcaaaacccatcctaacacctcatatcctttgctcctgccacagcagtaattgccttctcagttattccatgttcttcatgactctaatactctgcgtgtacttttccctttctctgcactacttctttcctcttcctttatgtgcaaactgttcctcatctctcagtacacaacttaatcgtcaactcctctaccaagcatatttgactcttccaaactatattaatattttttttagttcccagagcactttgtgcttacattttctgtggcatcattacaatcatagtcatttctctatcctaactttggtatctctatactgtgaggtcctgtctcactccttaatgaatgaatgaagggaaaacttgtttagaatgcaggagagggaatggagtattaactgatctctgtaccaaaaagcagcagtgttgggaatgtgaactgtttactgttccaggaaaattggaaatatgaaactctttaatcctttttgttttttaggcagagcagtcaattgcagagctgtcgagttctgaaaacaccctgaagacagaagtagctgatcttcgggctgcagctgtcaagctcagtgccttaaatgaggctttggcgttagataaagttgggctgaaccagcagcttctccaggtgagcaaagattttcctggtccccacagaagggctgggccctaactgagagcaagacggatcagctcccaaatgtaggtctgaaatgagcaaaaggaacatttacaatgcagaggagagcaaagactgtaaggattgggcttagccattataaatattcccctcccacacctccagcagaaccacctctggacttcagggtaagacaccaaggttgggaaggggcccatgtcctctggaaggaagactaggttttttgctggggttttcttgagatggatctccctctgtcacctaggctggagtgcagtggtgcgatcttagctaactgcagttttcatctcctgggttcaagcaattctcctgcctcagcctcctgagtagctgggattacaggcatgtgtcaccacacctggctaattttttttttttgagatggagttttgctcttgttgcccaggctggagtacagtggcacgatcttggctcgctgcaacctctgcatcccgggttcaagcaattctcttgcctcagcctcctgaatatctgggattacaggcatgcaccaccatgcctggctaattttgtatttttaatagagacagggttttacaatgttggtcaggctgttctcaaactcctgacctcaggtgatccacctgcctcagcctcccaaagtgctaggattacaggcgtgagccaccacacttggctgccctgggctagtttttgtatttttagtagagatggggtttcaccatgttggccaggctgatcttgaactcctggcctcaggtgatccatccacctcagcctcctgaagtcctgggattacaggcatgagccaccatacccggcctaagtctaggttgttaatcctgttgggtgagataatagcaatcaccagaaaagaatctgctgaagagcctaagtcccaaagaatcttttctataggttataaatttaacctataattatagcgagggaacctccttgcaatctctgtttccttgagtgttctctattccattattctgaattatttgagagcaggactttgccttgcatatctccgtccccagcatccagcccatctagtacctggaatataggcactagatcaaatgaatggattttcccccatcttataaacactcctttgttcatctttggagaatagattcatatctcacttggatttcagtcttagcatttgattcctaaactaaccatttgtctttgatgcttgtactcccttccctttttggccagtagttagaggaggagaaccagtctgtgtgcagcagaatggaggccgcagagcaggcgagaaatgctttgcaggtcgacctggcggaggcagagaagaggagggaagccctgtgggaaaagaacactcacctggaggctcagctgcagaaagctgaggaggctggggctgagctgcaggcagatctcagggacatccaagaagagaaggaagaaattcaaaagaaactaagtgaggtgagaagccaaaatggacaccatcatgtctaggtgtaatatatgctcattataaaaaattaaaacactacagaaattatctggaaagtgaaaaagtcttacttcctagaaatgaccagtgttactagtttgcagtatatcttccaattttaaaaaagaatgcctataacaattcttcactgaggctgggcgcagtggctcatgcctgtaatcccagcactttaggaggccgaggcgggcggatcacgaggtcagaggttcgagaccagcctgaccaacatagtgaaaccctgtctctactaaaaatacaaaaattagcccggcatggtggcacatgcctgtaatcccaactactcgggaggctgaggcaggagaatctcttgaatctgggaggcggaggttgcagtgagccgagattgcgccactgcactccaacctggatgacagagcgacactgctcaaaaaaacaaaaagaattcttcactgattctccactacttcattcacaccacccagtttgaattagaagcttctccttatactctgatagcacctcatgcttattttaactaccacattcctcatgctataattatctgtttatatgtctctaccattagaccaaaagctccttgaaggcaaagctatatcttatttgtttttatttctccagcttttagcatagtgcctaccacataacaggggccaagtaaatttttttcctgagccaatgaatgacctggctcaaaggtcatctttctcctctacaaaacctctcattgtcctaataattgtacggactctcccttcacagagtccctttctcgggacattgatgactttcttcccagtattatgtgtgcatcttctcaaggccaaaacctccttaggggcaggtcttctgctgtccctagcacagggtcttgctcacaggggagcattcttcctgggctgggggctctgtgggcggatcagggaaatagataaatgccacgtgctattgggtaagcaatccgggctcacagagctgggtccagaatctctgaagaggcaatgaccctaacctggtggtagcggccccaggggaatccagcctctgctccatctctcaccacattcttcccctcagtcacgtcaccagcaggaggcagccacgactcagctggagcagctacatcaggaggcaaagcgacaggaagaagtgcttgccagggcagtccaggagaaggaggccctagtacgagagaaagcggctctagaggtgcggctgcaggccgtggagcgtgaccggcaggacctcgctgaacaactacaggggctcaggtagggcccagactcagttcagccaagcacagagagagctttgcaaggcaaaggcgtgaagctaagctccctgccataagtatgcaggtcctaaattgattatgaatttataattgcccccctaacttctccaggtagccaatacttagaacccagctcctcttgaggaagggtaaggggcttgatgggtaagaaactcttctgattcctgaacctcacagctcagccaaggagctactggagagcagtctgtttgaagcccaacaacaaaattctgtgatagaggtcaccaaggggcagctggaggtccagattcaaactgtcactcaagccaaggaagtaatccaaggtgagaacccaactgggatgggatgcactccattccatggagatgttgaaaggcaggaagatggtgggagactattagaggtccttctccagcagggtgcagggcctctgagatgggagttgctcatgaggtcaggggagagggagaattttattaggtaaaaggagggggcggaggcctgatcctgtccctggcatgttaggggaagtgaggtgcctgaagctggaactggacactgaacggagtcaggcagagcaggagcgggatgctgcagccagacagctggcccaggctgagcaagaagggaagactgccttggagcagcagaaggcagcccatgagaaagaggtgaaccagctccgggagaaatgggtaagtggtcaatgtggccgggtatggcctcccttccatgagtgctctacctgctgcctcttggtccagttattgctgctcgtatgagtgaaattttgtaaccaagctgtaaaatccaacttcctgctattaaatgagttaatatatgaaaagcactaagagtagttcctagcatgtggtgggctccctatatgtgttagccattattattgttgttgtgttggtgtgtacagagaattgagagtggaccctgggatttaggattattaaactggcctcaggatgaaaacgggggagaggaatatcttggatgcattcttgtgcagttcagaactgtgttttgtcttttaataatgtaatttagtccatttggttttattgtggttttaggtgtatttggatttatttgtgccatcttatgttatttgtcttgcttttttatatcttttttttttttttttttccttgagacagtctcactctgtccctcaggctggagtacagtggtgcattcttggctcactgcaacctccgcctcctgggttcaagcgattctcctgcctcagtctcctaagtagctgggattacaggtgtgtgccaccacatctggctaatttttgtatttttagtagagatggggtttcaccatgttggccaggctggtctcaaactgacctcgtgatccacctgcctcagcctcctaaagtgcagggtacagctgtgagccactgtgcctggccatttttatatcttttagggaggggaaatctcctttcttaacttcttttagaggattaagttgggtgattaagttgtattcttttctcacctcttttttctctctgcaactgtggatgatatatactttattttaaaaatcctgttagtggttacctttaatatttttaaacatatacttaataaaatctcaaggttcagtagttttacccttttcctgaacgatacaagggtcttagaacattttacctgggccagggacagtggctcatgcctgtcatctcagcactttgggaggctgaggtgggcagattgcttgagcccaggagtttgagaccagcctggacaacacggcgaaaccccattccctacaaaaaaaaatacaaaaattagccaggcatggtggtacacactgtagtcccagctacttgggaggctgaggtgggaggatcacttgagcctaggaggttgaggctgtggtgagctgagcaccactgcactccagcctgagtgacagagtgagaccctgtctcaaaagcaaaaaagaacattttacttgtttcactgctccctaatttataggctattttgttcagtgtgttcagttctaactagtttaacaccacaaattatgatttttttattgttttatacagtcaatatttgttcagatacaacgaattgataccttttctgttcaccataccttcttgcatgtcagactttctattcagattttttttttttttttttgcctgaagtaggattttctttggtaagggtctgttggtagttaattgtctgaagatgtttctattttatttttattcttttattgaggcagggtctcactctgtcgcctagactggagtgcagtcatgtgatcatggcctactgcagccttggcctcctgggctcaggtgatcctcccacctcagcctcccaagtagctgggattataggcatatgccatcacacccagctaattttatttttggtagagacagggtttcaccatgttgcccaggctggtctcaaactcctgggctcaagcgatccacccgcccttggcctcccaaagtgttgggattacagaggtgagccaccatgtccagcctacttttattcttgaaagatagtttctggctttgttcaggcttaaaaaatagatagatagatagatagatagatagatagatagatagatagatagatagatagattcactaagtaaaacattcagatataagtttctaggatgacaattattttctctcaacattgttggtattgagaagttagctttcattttaatcattccacagtttcttgtgtttattattatttttttgtttgtttgttttttgagacggagtctcgctctgttgcccaggctggagtgcagtggcgcaatcttggctcactgcaaggtccgcctctgggttcacgccattctcctgcctcagcctcccaagtagctgagaccacaggcgctcaccaccatgcccggctaattttttgtatttttagtaaatacaaaaattttttgtattcaccgtgttagccaggatggtctcgatctcctgacctcatgatccacccgcctcggcctcccaaagtgctgggattacaggcgtgagccaccgtgcccggctatttatttttttatatttttttttattttttatttttttgagacagagtcttgctctgtcacccaggcttgagtgcagtggtgcaatctcggctcactgtaacttccacctcttgagttcatgcagttcttctgcctcagcctctagagtagctgggattacaggcacgtaccaccatgcccagctaatttttttgtatttttagtagagatggggtttcaccatgttgcccaggctggtctcaaactcctgggctcaagtgatccacccacctcggcctcccaaagggctgggattaaaggcgtgagaccacgcctggcaatttcttgtgtttagatgtgtatttcttttatttggttggaatttcttagacatcctgaatttaagatttcatgttgaaatatcaattctggaaaattcttatatattatctcttcaatattacctctttcctactgtcctgcttttatttatttactctttaaaataaatttttttttggccaattgcagtggctcatgcctgtaatctcagtaatttgggaggctgaggtgggcggatcacctgaggtcaggagttcgagaccagcctgaccaacatggagaaaccccgtctctactaaatatacaaaattagccgagtgtggtagcacatgtctgtaatcctagctattagggaggctgaggcaggagaatcgcttgaacctgggaggtggaggttgcgatgagctgagatcgcgccattacactccagcctgggcaacaagaacgaaactccgtctcaaaaaaaaaaaaaaatttttttttttaaatttattttattttattttttagagacagggtcttgctctgttacccaggctggagtataatgatacaatcatagctcactgcagcctcaaactcctgagctcaagtgagtcctcctgccgcagcctccgacgaactgcaactacaggcacatgccaccatgcccagctaattttttaattttaattttaattttttttttttttagagatgggtcttgctatgttatccaggctggtctcgaactcctgggctcaagctgtcctcttgcctcagcctcccacataagctgggactacaggtgcacgccaccatacctggctcttttcctactttcttctctctttctgtactctggttagttgtatgtcagacctttttactctatccttcatgtatcttcactgcctcttgcattttacatgtttacttttctctttgtatgctgtgttctggattatttttttcagatctctcatctagttactgattttccttttcagctgtgtcgaatctgatgtttattctattcaccaagttttaaatttcactttttaaattttttatttctagatattttatttggttattttttcatatcttcttggtcatttttttcagtctgttttccctaatttgtattttcagtccattcttttaaacatatgaaacatacttgtgtcctgtctagtaattccaataacttttaattaacgttttggggtctagttctgtaatttgttgtttctgttggctcttactcatgggcttgtttccctgtgtttttgtgattcttgtctatgagcatgtctttggaaattttcctttttttttcttttttctttttttcttttttcccccagagacctttgttctgaggaaggttttctgtgggaatctttttaggcctgaggcaaaggagtttttcctcagaggatttgtgcttctgtcaggaagctggaggactagcatcccaggaccaccttaaagtaaattttctgtttaaagttttttgacccacagtcaggcccagaccccatgtgcagctcagcttgtggttatgaattttcagaggagacttttttcctaccctgtatcaaagttgagataagcatatttccttgataatttccttctatagagtttattttgttttgtcccctctccacatccctccagtttctctttttctcccttcctccccatgtcctccttctttttgccttttcccccttaagctgaggtcactacagcccagagataggcatttttttttttctttctagagatggactatcactatgttgctcagtctgatcttgaactcctgggctcaagggatcctcctgtctcagcctcctgagtagctgggaccacaggcacagtccaccatgtctggctttttgttaaggactatatgctaggctttgcagaccatatggtctctgttacaattatctaactttgcaattgtagtgcaaagcagccatatataaacaaatgagcatgactgtgctcagataaaactttatgtatagatactgaaatgagaatttcatataattttcgcatgtcacaaaacattattgttttctaccattaaaaatgtaaaggctgggtgcagtggctcatgcctataatcccaccactttgggaggctgaggcaggacgattggttgagaccaacctgggcaacatagcaagaccctatctctttaaaaaaaaaaaaaaaaaaaaggtaaaggctgggcgcagtggcttacgcctgtaatcccagcactttgggaggcctaggtggccggatcacctgaagtcaggagttcaagaccagtctggccaacatggtgaaactccatctctactaagaatacaaaaatattagccgggtgtggtggcacatgcctgtagtcccagctacttgggaggctgaacaggagaatcgcttgaacctgagaggtggaggttgcagtgagccaagatcgcaccattgcactccagcctgggcgacagagtgagactctgtctcaaaaaaaaaaaaaaaaagtaaaaaccactcttagctcatagccagagagcaacaggtggtgagccagatttggtccacatactataatttgttaaccccagtccagatttttgtttgtttgcttgttttgtttagagataaggtcttgctctggtcacccaggctagagtatagtggcacaatcatagctcactgcagcctcaaactcccaggctcaagtgatcttcctgcctcagcctcctaagtagctaggactacagcgtctgcctggctttttttttttttttttttttttttttttttgagacagggtcttgctctgtcactcaggctacagtgcaatggtacaatcatggctcactgcagcctctacctcacgggctcaagtgatcctctccagcctcctgagtagctgggaccacaggcatgaaccaccatgcctggctaagttttttttttttttttttttatagagatggggtttcgtcatgttacccaggctggtcttgaactcctgggctcaggtaatctgcccaccttggcctcccaaagtgctggggattacaggcgtgagccaccacgcccagccacctggcttatttttatttttattttaaattctgaattacatttgcattgggtgaaagatagtggatttacttttttttttttttttttgagacacagtcttgctctgttgcacaggcagtggtgctgtttcagctccgcctcctgggttcaagcaattctcgtgcttcagcctcccaagtagctgggattacaggcgcatgctaccacacctggctaatttttgcatttttagtagacactgggtttcaccacatcagccaggctggtctcgaactcctgacctcaagacaaggtcttgctattgcccaggctggagtgcagttgtacaactgcactgtacaactctagctcactgaagcttcaagctcctgggcttaagcaatccttctgcctcagcctccagactagctaggactacaggcatgcaccatcatgcctggctaattttttttttttttggtagagatgtgatctcactttgttgcctaggctggtcttgaactcctagcttcaagcaatcctcctgccacagcctcccaaactgctgggattataggtatgaactaccacacctggcctacaccacaagtcttgctttgcttttggcttctgtggaatttttattattttcctgctggttctgtgatacattaaaatacatatttaatattttatccagcattttttgcgatttcgtagctggagggttcagagatcttgtttatcaagtatctggaaatggaagttgacttgtgctttatgtgtatttgtaatttgattgttattatgaggcaggcttattggcaagatgataaccagaagtttgcttatttttggaattctgtgcctagtctatagtcggtgcttaaaagtatttgttgaatgaacactgattctagcaggaatcagatgtataccatgtactgaaaactccataaataaaagatgctataaaacttctgaatgataagccagctacctacgtggccttggtttccctaaaaggattgactatagtggccatatctgggtcatgaaagggccttttctctcttttccttttctgtcattcagctaatcctcctgacttctgattgtcccactttattatttctctatgattgagcaggtcaactgccctcttaaaactctcgacagcctgttcgttttagcagtgactgccttctcctggaatcctggcaattagaagcactcttgggaggccgcgcgtggtggctcacacctgtaatcccagcactttgggaggccgaggtgggcggattgcccaaggtcaggagtttgagaccagtctggccaacctggtgacaccccgtctctactaaaaatacaaaaaaattagccaggcgtggtggcatgcacctgtaatcccagctacttgggaggttgaggcaggggaattgcttgaaccagggaggtggaggttgcagtgagccaagatcgcaccactgcactccagcctgggcaacagagtgagactctgtctcaaagaaaaaaaagaaaaagaaacactcttggcagttgtattctttattcttccatctactgtctgtctcccctttaagagtaatgatattggacacttgttaagcacctccccatgccaagcaccatgctgaatgctttattcacacaataaaggtgaataaatgcatggagaagtcactcagggctgggcgtggtggctcacacctgtaattccaacaatttgggaggccaaggcgaaaggatcgctagaggccaggagttcgagaccagcctgggcaacatagcaagatccccatctctaaataaataaaatataaaaagagaagtcagggttacatggctaataaggggtagaaaagggattcagggcccaaactcctaaccatttcttttttatccacctctgtaatgtcccttccaaatggttgcttagctgctattgtattccatcacttggctgcccatttattttagatagatctagttattaggaaattcatgttgaaccaaaacctattaccaggaacaaatgagccttagatttgcttgaaataccccaccaacatggttgctttcttctaggcatgttacaatttactcatgtcccagtggtgtaaaggtggcactttgaactgggcagaatattctgttcatggtcataccagcaatgctggactgttacttcctacacatcacagaattagctcttcttgtagctataacacacttctaactcacatagagcaaatagatcagtttttttaacacttgcaactgctattaacattcatctttttcatatttttacagttggctttggctttttgcagtcacatactctgccactgagctatacccgctgtctttggctttttgaaccagagggtaaaatgatttgtcattcatgactgtcctgtaactgacattacacattgccgggttttataaggaagaacaaaggaagacctcttttttttctttttattattattatttcttttgagacagggtcttgctctgttgcccaggctggagtgcagtggcgtgatcagggcttaacggcagcctcaccctcaaggccctcctgggctcaagtgatcctcctacctcagcctcccaagtagctgggaccacaggagtgaaccaccacacctgactaatttttgcattttttgtagataaggggtttcaccatgttgcctaggctggtctcaaactcttgggctcaagtgatcatcctacctcggcctcgcaaaatgttgggataatatatgtgaactaccacgtccagccagaccactgtcaattgtatggtctgggaaggcttcaccaaggaagtgttagtttaggcgtgaggaatgatggagtaggggggagaagggctttccaggtagaaggaagcatgagtaaaggctctaaggcatgaacatgttggctgggtgcagtggctcacacctgtaatcctagcactttgggaggcctaagcgggcagatcacttgaggttaggagttcaaaaccagcctggccaacgtggtgaaaccatgtctctactaaaaatacaaaaaaaatagctgggagtggtggcgggcgcctgtaatcccagctacttgggaggctgaggcgggagaatcacttgaacttgggaggcagaggttgcagtgagccgagatcaccccactgcactccagcctgggcgatagagtgagactctgtctcaaaaaaaaaaaaaaagtgcttagtgtgctcaaggacctgcaaggaggcaagtgtgtgtagccagggtgtagtgaatgagggggaaagctgcacaggatgacactgggaaggctgaaacactagaggcgttcccattacatgaataagcaacgacaaacttacaagcattttaaaggaaaagtgcagggaatactaatgtgatgatgatgctggctgttgtgtattgcccgctttctgtgtgctacgcacatttaaagtgattcacatgacttatctccatcctcaatacaacctgaggagaatgacactgttgttatccccattttaatagatgaagaaactgaggcacagagttgtttagaaattgagatcatgctagtagtggtagattaaagattctccacccaggcagcccaactccagagcccttcacctctatcctgtacacctaatagagggtcctgaactagtcagagagcttgggaaagctttggttgctggaagaccgctaagacaagaagcacccctatcctaatgctcttatataatacagggagacatcctcactgggccaggcctgattcttcaggggctaactctgcaactctgagtagaggagagcaggcagcagacagccagaattggccgcctcagttcattgttacaactgtcaaccacaatgtggctgctttaaagataacaaatacggagctgtgtgtggtgtcatgcccctgtgttcttagctactcaggaggctgaggcaggaggaccacttgcgcccaggagttcgagtccagcctgggcaacatagtgagaccccatctctaaaaataagaatgcctaggctaggcacagtggctcatgcctataatcccagcactttgggaggccgaggcaggcagatcacttgaggtcaggagttcatgaccagcctggccaacatgttgaaaccccatctctactaaaaatacaaaaattagctgggcatggtggggggcacctgtagtcccagctgctagggaggctgagacaggagaatcacttgaacctgaaaggtggaggttgcagtgagcggagatcgtgccactgcagtccagcctgggtgacagggcaagactccgtctccaaaaaaaaattaaaaatagaaatacattttaaaacccagatacttgtagcatatataagggacaattgcagtttggaaggtacttccacatgtattatataattttattttttaaaatgaatctcatttggttgtcatgaaatttggtaagatagataaggcagggaatattagccttgctttacagatgaggcaacaggcttagagaggtaccaaggtcaccccactagtgagtagtagagagactttgtttttccaatccagtacccctgcctcccctcctcacccatttggttctaatggtgtttccttcatgtggccaggagaaggagcgctcctggcaccagcaggagctggcaaaggctctggagagcttagaaagggaaaaaatggagctggaaatgaggctaaaggagcagcagacagaaatggaggccatccaggcccagagggaagaagaacggacccaggcagagagtgccctatgccaggtgggaagctaggaggattggagctgcacgtccagtcagcgatctccttaccttgaccacttccttttctactcccaagaggagtgctgcagaggggcttccagaagagagggtagctacccactttgctaacagtgagcagggtggtccgcaccattagccacagttccggcagtatgtcatacttcctgagggagggctgacatgtaccacatcctgtcagcttgcaaaccagtggtaatctttgcacttccttgttctgaacccatgggctcagaccttcctttgccctcagccccttcccatttgctaggagagccctagggcagctgggatgtgcttgtggcctcgttggtgagcatggtaatcctgagcccacaagctgttacccccctacccctccacagatgcagctggaaacagagaaggagagagtatccctcctggagacactgctgcagacgcagaaggagctagcagatgccagccaacaactggaacgactgaggcaggacatgaaagtccagaaattaaaggagcaggtatggagggtggtctcgggagtaggggagaaaggggcactcatttacccattcgaccatgaagggttcttgggcacttcttatgtgccaggccctgtgctaggtgctgacatatgacaagtacataaaggtatggcacaggctgggcagggtagatcacgcctgtaatcccagcactttggcaggccaaggtgggtggatcacctaaggtcaggagttaaagaccaacctgagcaacatggtgaaacccatctctactaaaaatacaaaaattagccgggcatggtggcaggcccctgtaatcccagcacattgggaggctgaggcggacagatcagttgaggtcaggagttcgagactagcctggccaacatggtgaaacctcatctctacaaaaatacaaaaattagctgtgtgtggtggcatttgcctgtaatcccagctgcttgggaggctgaagcaggagaatagcttgagcccaggaggcggaggttgcagtgagccgaggtcacgccactgcattccagccttggtgatagagcgagtctcaaaaaaaaaaaaaaaaaaaaaaaggtgtggcacagcagtcagcataacagacattgcccctgctctcaaggaacttacattcctgtggcagaaatggatgacaaatgagcagacacaaagtaaatgagattattacagtttgtgataagtgctgtaaaggaaatagaatgatacaactgagagtgagtcaaaggaggttcactttgcacttagtggtcagggaaggcctcactgagaaagtaacatctgagctgagacttgaaggttagaaagaaaccagctccgtgatacaacataggtgaaccttgaaaacatcaggttaagtggaagagccatatattttatatgatatgcttccatttatatgaaacaccaagaataggcaactctatagaggcagaaaacagatttatggtggggaatggggtggggaatggggattgactgtgaatgggcacggggtttattttgggattgatggaaatgttctaagattgattgcgatgatagttgcacaactctgtgaatatcctaaaacccactacacagtatacgttaaatgagtgaattgtatggtatatgagttatatctcaagccatttgaaaaaaaaaatgcctgccatgtgaagaacactttaggcagaggaaacacctgtcgcaagggccctgggacacagaagagggcttgggaagttcaaggacaaaaaggaggcagtgtggctccagcttgataaactcaggggcgagtggagcggtagccagaagccctgtgtcagccattgtaggagcttggattttgttctaagagcaatgggaaactgttgggtggtatgtatgtatgtatttgtttgagactgagtctcgctctgtcacccaggctagagtgcggtggcactatctcagctcactgcaaccttcgcctcccaggttcaagcaattcttgtgcctcagcctcccaagtagctgggattacaggtgcccgccaccatgcttggctaatttttgtatttttagtggagaaagggtttcaccatgttggccagggtcgtctcaaacttctgacctcaagtgatccacccaccttggtttccctaagtgttgggatgataggcgtgagccaccgcgcctgggcagttggatggtatttaaaaagcaggggtgggatatgatttatttatatatacgtatacatatgtatatacatatatgtatatgtattctctactctcctgagtagagaatagtgtgtgtgtgtttttaggggatcgtggcatcaagtggaagtagggatatggttaggagactgtttccatggtctaggtgagagactattaccaattcatggactctgaccaagaaacctgggtgagccagtgcactttgtgagggaggagagggactaggaagtgagaaggtgaggtggaaacaatgtggattgctggctcctgcctcagcttttgccaccccaccaaaaaaaccagtatttctatgacacagatttcctctactcaatgatttcttatccctcttcaggagaccactgggatactacagacccagctccaggaggctcaacgggagctgaaggaggcagcccggcagcacagagatgaccttgctgccctccaagaagagagcagctccctgctgcaggataagatggacctgcagaagcaggtcccctcctcctccccaccaagtcccatggtccttccccaacacagccaggctttcccacttcctcttgcaggacagggagaaccttggccctgctgcctggtttgggagggtagatgggtgggccacagtactgagtggaaaattagagggtgctcagagttgagcatgtgcctggcagagccctgggatagtaatctctttctctgtaatggtcacagagtttttgttttccctggctgtctcagtttcaattgttctttccgtccttgccaaaaatctaatatttttacatactaggttgcttctcctcagaatcctatatcaaatgatgttctgacttttcatttttaaaaaagcaatcacaatacatgttttgcctttgggagtagttatagtcagcctttttttccttctttttggtgggggagacaggatttcactatgtcgcccgggctgaagtgcagatcataactcactgcagtcttgacttcccaagctcaagcaattctcccacctcagccccctgagtagctgggactacagatgtgtgccatcacactggctaatttttaaatttttatagagacagggtctcactatgttgcccagactgatctcgaactcctggtctcaagcagtctgctcgccttggcctcccaaagtgttgagattacaggtgtgagccaccgcacccagcccagccaagatttttatttgtgcctgcctctatgcagcatatgtgaggctgggaggcagatgaccaggccgaattgtattgaggaagggggtggttaagaacagtgtgtaggaattggtagaatcgccagagcattggaaatggccactgactatggtaaacctcgaaggaccctgaagccctaggtgaggagcatcttcccaccggccccctgccctgccatcttggtcttcatgcccttaattttccaggtggaggacttgaagtctcagctggtggcccaggatgactcccagaggctggtggagcaggaggttcaggagaagctgagagagacccaggagtataaccgaattcagaaggagctggagagagagaaagccaggtaggctagataggccatggaggtggcttttgtctatctggctgccatggtcactgtgatattgacagttgtttgctcaggccaccttgcctttcatgtctgcaactctgggatgtacatgtagccatgtggagaggacatggttcctgtcttcaaagcttgaacttcatttatttagtaaatatttcgtgaacgcctgttatgcaccaggcaccatgcttggggatacagtgataaacaagactgtatggtccctgccccagtagaatttatagttttgtggggaagacattaatcaaataataactcaaattattacgttatgacacatggaggaaacagggtgagagagagaagagactttagaaccattgttagggaaggcctttctcaggaagttgcatttaaactgagcactcagcatgaagtggagctacccatgtaaaagggtgagggggagttctattccgtaagaggagaaataatatgcaaaggccgtgaggcagataaaagtttacagtgttaactgaaagagtggttggagcctgattggattgtaattggagcctggtgaatgaggagagtggcatgagctgggcaggtccacagcattcaagatttggtaggccacagcaaggagttcgtagtttgagtttcataggaaacctctggagaattttaagcagggaaattgatacaatccaacttatgatgtatttgaagggattgtaatgccatgagacatcaggagtgaaagaagaccattcagagtgaagagcagcttgtattcttagtgctgtgggaatttgagaaggggatgggctgggtgctgtgtcccacgactgtaatcccagcactttgggaggctgaggtgggcagatcacttgaggtcaggaattcaagaccagcctggccaacatgtctactaaaaatacaaaaaaaaattagctgggcatggtggtgggtgcctgtaatgccagctacttggaaggctgaggcaggagaattgcttgaaccaggaggtggaggttgcagtgagctgagatcacaccactgcactccagcctcggtgacagaacgagactccatctcaaaaaaagcaaaaaacaacaaaaaaaagacacagtttgagaagggacacattattttggtggtgaatctagaggcaggaagacaagttaggctggtacagttgtcctgatgagagatcctaaagctaaaccaaggtagggtagtggggaagaggaggagagaagagaagaggtttaaaggatgttaagggagttagaatcaattgtatataattatagattggatgtaggtaggttgaagggagaactctggagtagtcaaggttctacgttaggacactgtgtggatggaagtgccattcactgagctagggaacatagtaggagatgattgggtggacaggggaggagaggaaagggatggggaagatttggacatgttgaacgtgaggtactaatataaggtatgtgtgaaatttgccagagaagaataaggttgatagctaggcatggtggcgcatgcctgcaatcccagctactctggaggctgaggcacgagaatcatttgaacccgggaggcagaggctgcagtgagccgagatcgtgccactgtaccccagcctgggtaacagagcaagactctgtctcaataaaaaaaaaacacaaaaaaacctgtgaggttgaaatggggcatcatctgcaggaagtacctaggagcacttattatagtaagtgctcaataaatgatagcttttattgttacatcataatcattatcattactatttctattttgattattaatgctatgtttagaatactcagatgagaaggtaatttttcattccctaagagaatggcccagcactctgacccctctctttttagcctgactctctcactgatggaaaaggaacagagactccttgttttacaagaagctgactctattcgacaacaagagctgagtgccctgcgccaggacatgcaggaggcccagggagaacagaaagagctcagtgctcaggtacttcccactctggttatgagctctgcatccctggcagaagcctgattctgaagcggtggattgattgctctgagtcctctcatggagaggacccatctatttttcctgattacaggataggctggtgcctcaacacccctacaggagggggaagccaggactagacaaggcgggggcttgggaatctgacccagagatggacatggctcctgtgggaaacctgacagcccacagcaaagtgcacacgggtgtagcccatgcaggcctggttccagcacaccggcttcaaagtatgctgggtctggttggcaagatgtagcagggagaatgagcaaccagaaatactccagatcaggcaggcagcagcaagacttccagggactcagtctgcccccatcagaaccccagatattgtatacagagaaaagatggaactaggagggaaggaatggggtgtaagagccagatggtggcttgcaggggttaagggcacacaggtttggctgttcaatggtcttgagtttgaatgtaagctttctaattgtgtgaacgtcagcttcttcatccataaaacaagggtgaacaattcttgttcctaattcctataaccattataggaatatataaagtgtcaggaacacaataagcattcaatacatggtagctatgttattgtgactggtcttactaggcgcagcgtcgaggtttcagggcagagttctggtcatagcaaggagccagcatatctgcccaggaagccagggctgaagcccattagcatagcagcctgggcccatgtgttcagtagtcggcaggcagccaggtgttagatctagggtaacactcatttcagagcccctctacctgcctgagagctgagctgaaatcctcccagccctgatcagagtttgtacaaggattgagtggggtctggcctgggaaggcctgaggagagggtatccgcttcctgcttatattatgtaaaattcttccttgacagatggaattactaaggcaagaggtgaaggaaaaggaggctgactttctggcccaggaagcacagctgctggaggagctggaggcgtctcatatcacggagcagcagctgcgagcctccttgtgggcccaggaagccaaggcagcccaactacagctgcgactgcgcagcacagagagccagctagaagcgctggccgcagagcagcagcccgggaaccaggcccaggcccaggcccagctggccagcctctactctgccctgcagcaggccctggggtctgtttgtgagagcaggcctgagctgagtggtgggggagactctgctccttccgtctggggccttgagccaggtgagacagcctccccagaactaggtcctttgggccaaagccaggcctggctcccaggggaaagggagaggaatgctatttgttagaccatattgcttcagggttaagattacatacttgggaattaattctgagtttaagccccagctctaccatttgctagctatgtgtccttgggcaagtcacctgtcctctctgagcttgattttcctcaactacaaaatgaggatgttaaaagtatttaccttataatttcaccaaggagttatgaggttgcagatgtgaatcacttacacggttcctggcacttattaagtgcgtaataagtgatagctcgcattaatctagcacccaccatagtgcctggcccatacttatggagaaaatatgtgatgagtgaactgctgagaaaggggttctttgcggagaggagggaccagttggaaggacagggctgtgtctggagaggtctggctgtttcttttcatagtggcagccaggtaaggaggttttcctcattttttcagaccagaatggagctaggagcctctttaagagagggcccctgctgactgctctctccgctgaggcagtagcatctgccctccacaagcttcatcaagacctgtggaagactcaacagacccgggtatgtttctctgctcccctttcccgaactctttacatccctggaaaagcatgaggcaaaggggtgtgaagcagtttgacctgttttattcctgagatcaagttgggatgagtttcacctctatcacttaccacctggcaaccacaaatgaagcatttgaagttcctgggccttgttttcccttgcagagtagggcagatagtgcctgctcagggttttgaggattagatgagagaggatcttgaatgagccctgtaaaccaaaaaaccctgggtaggccaggcacggtggctcatgcctgtaatcccagtgctttgggaggctgagacaggtggatcacctgaggtcaggagttcaaaatcagcctggccaacatggtgaaaccccatctctactaaaaatacaaaaattagccagaggtggcggtgggcacctgtaatcccagctactcaggaggctgaggcaggagaatcacttgaacctgggaggtggaggttgcagtgagccaagattgtgccattgcactccaggttgaacgacaaaagtgaaactccatctcaaacaaacacaaaaaaaccctgggcagatgtatggcattgttttccatcatcttccactcagctatgaattaattcttggtacccaggcttccaagagaaaccctagaaatcagtgaccactgagatttgaggttggcatttataggcatgttctaggcctaggtctgaaagagctcataaattccacctcacagtgaacctatcagtcaatacaaattgagtgtcatccatatgtcagccactctgggctgggtatacaaaaaggagaaagacctggtctctgcctaaagaaggcttgtgacatggtggaggaaccaaactgcattctactggaaagcagaactgagagaattaattggatcaataacagacgcaagtgatgcactgttggaactaggaggagggggcaattcatcctgatttgggaagggtcagaaggaaagaagagatgacctttgggctgagctttgaagtaggagtgttgagagggaagtggtgacccctgggctaactttgagcaggagctctgtttcaaaagacatagataggtcagaaggggatggattctcacactccatccaagtggagcagagcctgtcatcacttcaggaagctaaatacacatgtgtttaaaggaagtaacccggcaatctgggagtaggtccacaatggcggcccaccacagaagctgagaatgaggagagagcttgagccctgcattgttttgtggaagatgaggaactcacgtttagccatgcccttcctttcccaggatgttctgagggatcaggtccagaaactggaagagcgtctaactgatactgaggctgagaagagccaggtccacacagagttgcaggatctgcagagacagctctcccagaatcaggaaggtgagaagctcaagacaggcagggagattgagagggagaagggataggtggggagcccagaagtggcaggcacaggcctagcagccactctgtttattttattttatttttgagacgacatctcactctgtcactcaggtttgagtacaatgtcacgacttcggctcgctgcaacctatgtcttccgagcagctaggattataggcatgcgccaccacgcctggctaatttttttggatttttaataaagacggggtttcaccatgttcaccaaccagcggagccaccggggtctctaggagctcctgcacaattataggattgggggctagaagggacctccagtgtcatctggctcaaccctgtctggaattgagggccaaggctctctgtgatgaggatgaggacatattgggatgattaccaggcagcgctggggctggcagcagcagggagtgcttgaactcctggcctcaagtgatccgcctgcctcgacctcccaaagtgctaggattacaggcgtgagccactgcgcccagctgcactgcattatttacccagaaatgtgaggtgagatctagatgcacttccaaaggggtgctgaccaccttgaactattttttcagctttgcttggcctttgaggcccatcctggaagaagagattaggaggaacagatttgatgaactgaaagaaggaaatggctgggcttccattttctgtctctgtagatttaaaaattaaaaaaattggagacccagggccaggactgtaagaacattataaaactgcatcttttgtcatccatgttacttatttttatcatcttcaactgtgtcctccaagttagcctttggtagctgagggattatgagcttatttgggagaaagcaaagagaggggatctggggaggatatatccatgtgccagccaaggactagaaagtgtcatgactccttacaaaggacaggagaggaagggtcttgaagctcaagtttctactgtaaaagagaagagttagccgggtgtggtggtgggcacctgtaatcccaactactcgggaggctgaggcaggggaatcgcttgaacccgggaggtggaggttgcagtgagccgagattgtgccactgcattccagcctgggtgacagagcaagactccatctcaaaaaaagaaaaaaagagaagaggacaccttgggtctgggccttttttgaggccgtttgagggttccctgagagccacaaaaataatgggattccaacgcctgttgcagaaatggtgggcaaccagcagagccacccgggtctctaggagctcctgcacaattataggactgggggctagaaggaacctccagtgtcatctggctcaaccctgtctggaattgagggccaaggctctctgtgatgaggatgaggacatattgggatgattaccaggcagtgctggggctggcagcagcagggagtgctgccaggcaaatagaagcagctggcatctgccagctcttgatgtccttgatatctctaggacactggatataattttctccttcttggccttccttccctttgaatctgttccccatcctccatctgcctctatatccctctatatcccaaacatgggtcttactccactacctctcctctcctctcctctcttctcaaagagaaatctaagtgggaaggaaagcagaactccctagaatctgagctgatggaactacatgaaactatggcatccttacagagtcgcctgcggagagcagagctacagcgaatggaagcccaggtaaagtggtactggtttcagggaggggtttgcctcaggagtagtcccttgggcccaccttggcctgtggtcctgtgtcccacttccttcagcaagtctgtcagttcctctggctgtctccatgtccctgggggccattattcaggttccaatgaatcctccttcaattgctttttctgaattgaggttgatatttttgccccttgtcctgaaggaccagcgtctcccctgggcatagcagagtcctggaaggtggtagggatgcccttttacagtatcagcttaagtggaatataccaccacttttttttgcccaagtccttatcactgctagtgccacaaaataagaaagagaagggtcggtgttggggtgacagtagcagggaagtgtagtctaaagtggcttttcatcttgtcttctagggtgagcgagagttacttcaggcagccaaggagaacctgacagcccaggtggaacacctgcaagcagctgtcgtagaagccagggctcaggcaagtgctgctggcatcctggaagaagacctgagaacggctcgctcagcactgaagctgaaaaatgaggaagtagagagtgagcgtgagagagcccaggctctgcaagagcagggcgaactgaaggtggcccaagggaaggctctgcaagagaatttggccctcctgacccagaccctagctgaaagagaagaggaggtggagactctgcggggacaaatccaggaactggagaagcaacgggaaatgcagaaggctgctttggaattgctgtctctggacctgaagaagaggaaccaagaggtagatctgcagcaagaacagattcaggagctagagaagtgtaggtctgttttagagcatctgcccatggccgtccaggagcgagagcagaagctgactgtgcagagggagcagatcagagagctcgagaaggatcgggagactcagaggaacgtcttggagcatcagcttctagaacttgagaagaaagaccaaatgattgagtcccagagaggacaggttcaggacctgaaaaagcagttggttactctggaatgcctggccctggaactggaggaaaaccatcacaagatggagtgccagcaaaaactgatcaaggagctggagggccagagggaaacccagagagtggctttgacccaccttacgctggacctagaagaaaggagccaggagctgcaggcacaaagcagccagatccatgacctggagagccacagcaccgttctggcaagagagctgcaggagagggaccaggaggtgaagtctcagcgagaacagatcgaggagctgcagaggcagaaagagcatctgactcaggatctcgagaggagagaccaggagctgatgctgcagaaggagaggattcaggttctcgaggatcagaggacccggcagaccaagatcctggaggaggacctggaacagatcaagctgtccttgagagagcgaggccgggagctgaccactcagaggcagctgatgcaggaacgggcagaggaagggaagggcccaagtaaagcacagcgcgggagcctagagcacatgaagctgatcctgcgtgataaggagaaggaggtggaatgtcagcaggagcatatccatgaactccaggagctcaaagaccagctggagcagcagctccagggcctgcacaggaaggtaggtgagaccagcctcctcctgtcccagcgagagcaggaaatagtggtcctgcagcagcaactgcaggaagccagggaacaaggggagctgaaggagcagtcacttcagagtcaactggatgaggcccagagagccctagcccagagggaccaggaactggaggctctgcagcaagaacagcagcaggcccagggacaggaggagagggtgaaggaaaaggcagacgccctccagggagctctggagcaagcccatatgacactgaaggagcgtcatggagagcttcaggaccacaaggaacaggcacgaaggctggaggaagagctggcagtggagggacggcgggtccaggccctggaggaggtgctgggagacctaagggctgagtctcgggaacaggagaaagctctgttggccctccagcagcagtgtgctgagcaggcacaggagcatgaggtggagaccagggccctgcaggacagctggctgcaggcccaggcagtgctcaaggaacgggaccaggagctggaagctctgcgggcagaaagtcagtcctcccggcatcaggaggaggctgcccgggcccgggctgaggctctgcaggaggcccttggcaaggctcatgctgccctgcaggggaaagagcagcatctcctcgagcaggcagaattgagccgcagtctggaggccagcactgcaaccctgcaagcctccctggatgcctgccaggcacacagtcggcagctggaggaggctctgaggatacaagaaggtgagatccaggaccaggatctccgataccaggaggatgtgcagcagctgcagcaggcacttgcccagagggatgaagagctgagacatcagcaggaacgggagcagctgctggagaagtctctggcccagagggtccaagagaatatgatccaagagaagcagaatctggggcaagagagagaagaggaggagataaggggccttcatcagagtgtaagggagctacagctgactctagcccaaaaggaacaggagattctggagctgagggagacccagcaaaggaacaacctggaagccttaccccacagccacaaaacctccccaatggaggaacaatctctaaaacttgattctttagagcccaggctgcagcgggagctggagcggctacaggcagccctgagacagacagaagccagggagattgagtggagggagaaggcccaggacttggcactctccctagcgcagaccaaggccagtgtcagcagtctgcaggaggtagccatgttcctacaagcctctgtcctggagcgggactcagaacagcaaaggctgcaggtaagtcactccatggggagtaagggccaggggacacacccctgtctggctgagctcagggactgcccaccaccctgggccctgtggcacctcaggggtatgagaaagctgagatcatgagcacctcaacatcggtgggattcaggctactgtgctagtcgggagatacagagaggataagaaccccacagtccctgccctcacagagttcacagtctagtgggtaaacaacgataatgcagtgtggttggtgcctaatgggggaagtttagtatgccccaggcatgctggagggatgcccaccctttcctgggagtgggtcctgaaaggctttctggtaaaagtggtgtttaagattagacctgggccaggcacggtggctcacgccggtaatcccagcactttgggaagccgaggcgggcagatcacttgaggtcaggagttcgagaccagtctggccaacatggtgaaaccccgtctctactaaaaatacaaaaattagccaggtatgctggcatgtgcctgtgatcccagctacttgggagtctgaggcaggagaattgcttgaactcaggaggcggaggttgcagtgagccgagatcgcaccattgcactcgagcctgggcaaagaaacgagactccatctcaaaaaaaaaaaaaaaaaaatagacgtgaagggaccagtaaggaactagccaagcacaggttgaggaggagcattcacgggaagaggaaaagagggcgagaacaagtgtagtatctgtgtagatggttcaggttgcatgggacagagggaggatttgggaagagaccggaagacagcaggggccacacctgtcagggcttacaagtcatgctgaggacctgggtggtgggaagcagatgaagtttttgcagcaggggagtgatgtgatcagacatacagctcacaaagattgctcaggctgccgtgtggagcaacagcatgtctggagagacccactgggaggctgtactgggaagtccaggggagagcttgtgccctaagatggaaagtgtgaatggagacatgtgggtgggtctgagaggtaggacttgattggctaagaggtgggaggaataaagagagggcagaaagaagtcaaagatgacactcaggttcctgttcatgaagatgaagagaagcaggtgtgagaaagaggagtggaatgaatgatgaggtcagtttggaaatggagggaggagcctgttggcaggtcagtaaaatgatctgaagctgaaggatggagttgaagccagagacactttggagtcatcagcagttagaacaaatgggtttcttgtaggcagaatgttgagtgagagaggaagtgggcttaggagaggacttcagggtgtattatttaacctcaaggtcaagcaccgtgtcttagtcacctttgtacccccggtactgagcacaagacctgcagagagcaggcaaacaggaaagccaagttggctcaagagagagaggcatcatctctttttccaaaagacgcccagtccaattttccagggaaatagactctacatcctggtcccttgactgggccccagagaaccccagacacacagtcccccagagagttcattctgggaactcacaaagctctgctcttggtgaagggcaatatgaggagaaggaggtccatctgtgaactccaaagttcacagggtttgaaatacagtagtgcggcttatcagctgtgtaaccccgggtgaatgccttcactctgatcttcaatttctcatcagtaatataggcattggtggtatgacatggcatgatatgtatgaattgcttaggaagaaagcactaagtggacctcctttcctatgttcaggcccattcttacaggcacagcaaaagtaagttatgtaattgggcaggagggcacttcccacccatactcttgggttactgagcagtattcactcaataacataactctggtcagagtcacttcacccactgccacctccaaacacacagggtgagactcttgtctcaaaaaaacaaactcataaatggcaggactggaatgaggtctgagtcatctgcctctagagcgcaggctttctgtcaccaagctcttcctctctcccaggcaacccacatccacctgcgtacacttgttttctcttgttcatctcttcttgactgttatcatttatgaaccacagggcacctagaaagtatctagcatgaggcttccccatttatccaaagggacttaacctaaggacttgatccatgtttcatggtgcatgtagtcgttttataaatgaggaaattggggtttggggagagcttgtgctttgaccagagtcatatagccactgagtggctatatgggccactgggtacgccacagggcacccagccctgtgtgactcgagagtccatgctgttcccacagcacatcagtgctctgagtcattgctcagccttctaggagatgtgaagtgagctgggggctctgatcctagcttccttgctagctcaccgcatatccttgagaagagcccctctgctcctttgttttacctatctgtaaaatgaaggttctgtactagaatgactcagagcctctaggaaaaataagacaaaagcctgaggagaacattgaaccgctgtttgtgtggaggatgggttggtctggatatgaggttggcaaggtgtgattttgctccatacctccgtaccctaggatgaactggagctcaccagacgggctctggagaaggagcggctacacagcccaggtgcaaccagcacagcagaactggggtccagaggggagcagggtgtgcagctgggagaggtgagctgggggctctgggggaacaggtgacccagcagggagctcctgtccaggggtttgtccccttcccttgggaactgggttcctgaagcttaaacctgccagattggtctgtgtgtcctctgtctgttccctacctgtcttaggggctgcccaggtgagattcacaggtctttcccacaggtctcaggagtggaggctgagcctagtcctgatggaatggagaagcagtcatggagacaaaggcttgaacacctgcagcaagcagtggcccggctggagattgacaggagcaggctgcagcgccacaatgtccagctgcggagtaccttggagcaggtgacccctcttcttgtccagtgggcatgcatctccacttctcgtgtggtccctagagcataggctcagtaaattacagcctgtgggccaaatccagcctgctgcctgtttctgaaaattaagtttgtttttttttttcccgagacagagtcttgctctgtctcctagagctggagtggaatggtacgatctccgctcactgcaacctccacctcccgggttcaagcaatcctcctgccccagcctcctgaatagctgggattacaggcatgcaccaccatgcctggctaattgttgtatttttagtagagatggtgtttcactatgttggccaggctggtcttgaactcctgaccttgtgatccgcctgcctcagctttccaaagtgctgggattacaggtgtgagccaccacgcccagccctgaaaattaagttttattggaatacagccatgcattgtttatggctgcttccctgctatgccccacaaagcctacagtacttactgcaggagaactttgctggcctttgctccagaggtctgagaggctggccctgcctcttctgcttcaggagcacttctttgcactgaggcctgccctagctgtgccttcctcagccaggagttctcttcccatggttactgtcccctcatatacctgcacaggcactggccacctctggagaaaggcagctctgctccaaccacagagccaagccgagccctgatttcttatttgcaccttggcaggtggagcgagaacggaggaagctgaagagggaggccatgcgtgcggcccaggcagggtccctagagatcagcaaggccacggcttcttcacccacacagcaggtttactcattttcctcagctgcagccttagagagcccaaccccagccaccagaaactcagccctcctcattgcatatcccgggccaacagcacttcagctagtccagagagcccctcctgactgcattctgccctgctcggcacagctcagtctgtccctgccctgagaaggaggcccaacattggggtgggggttggggtggctagtggccctgccttctgagggacttagatctgtgtactcccagaccagtgccacaggctggcccgggagtggggctcatggggctctgcttaggatccctggtgtatgggggttgtgtggtgcttgccagctcctgaggagcctaggagcttgatcacagcttgatctcttagacctttttacaatgttgagtttataggcttagggtccatggtctttcctggagccagtgtcccttttttgggtaagaggcttggggaagactccccaaactactcgtctaggtgaggtatccctgccaacagacacaggcttgcagcctgacagggaggcgctgtttatggtggctgagcactagatctccatcccttgtcctttattgaaagttctcaagggcaggcaccgtgtcttcctctctgcatccttagctcacagcccagggctagcacaaagcagatacatggtgtacttctgttaaattaaaacatgcctcagagaagcaaatgccatccaggccttttggatgttttgtgtcaggtctccatggcgttgcccattatgctggtgtggggcctctccttgctgcagggcctgctgccccatagacgtccagtctgagttcagatgcttctggcccatagcccttgcccaggcccctaagattgtgatgaggttctgcaaggaaacttgcagaaaccccagagtgggaaggcctatgccaacaagagtgctgtttgtcttccttaggatgggagaggacagaagaactcagatgccaagtgtgtggctgaactgcagaaagaggtatgttctggattttctaagcccatattccctcccttgcactcaggccctttgtgcacctccagcagggagaggggaagttcctcccttcagagaacttcagtctccatgggaggcaaaaatagtcccagtcccaaccccatctctcatatgcctagggtgggagtggggaagaaagcatgatcctggcccccgacttccaaatccatacttagaaagggaaaggaataggaagagggctgaggagcaggcagaagattctaggaggacaggtgggagcaagggaagccatcctggcctccctgccctcagaggtgccctcgcagccaagactgttgccagtgccccagacagaggagccaggcaccagcacaagctccaggccacacagctcagcacaagctccaggccacacagctcagctcaagccgccactcgcagagaagtgacttgaagagccttcctgcctcttaggcctcaactaaaagtccactctccctttcaagttgcaggaatcataagtgttacctttttatttctgagcctatttcagaaatcagtagtcactactggcagggcctgactctgtagctagacctaagctattactttgaattctattaaactcagaatgtttttctattttattaaaaagtcaaagcaggtgcagtagctcacacctgaaatcccagcactttcggaggccaaggtgggcggatcgcttgaggtcaggagtttgaaaccagcctggccaacatgacgaaaccctgtctgtactaaaaatacaaaaattagctggacgtggtggtgcacacctgtaatcgtagctactcaggaggctgacacacaggaatcacttgaacccgatggggtggaggttgcagtaagccaaaattgcatcactgcactctagcctgggcaacagagcaagactctgtctcaaaaaaaaaagtcagatagtggttatacttgagtatatattgttatcagcctcatcaaaatgtacatttaaaactgggcatttttcacatgtaaattatctttcagtgaagttgatgaatagctttgtggttttcaagcgcgctatttgagtcacatgtgcagccaggattgagaatcactggattctagaattcctaagggcccttcctctaaactctctacagcctgtttctgagattcgtgtatgtggtagagttgattcagatgatcagccaacgagcttcagagaacacagagcaggaagagctgggacaacttcagggccctcagctgctctcgcttttttttttttttcctgcccaccaggtggtcctgctgcaagctcagctgactttggagcggaagcagaagcaggactacatcacccgctcagcacagaccagccgtgagctagcaggcctgcaccacagcctctcacactcacttcttgccgtggcccaggcccctgaggccactgtcctggaggcagagacccgcaggctggatgagtccctgactcaaagtctgacatccccagggccagtcctgctacaccccagccccagcactacccaagccgcctccaggtagcagccacagccaggagcacacagacagaagactgtgtcatgggtcatggcccctccgcacacctacaggtttgccaaaggaaaagcctggctctgttaggcacccaggagccccaggtcggcgggtgttcccaggaagaggaagtaaatctgcaaccctggggaggaccccaactcacctgggaatgaggcaaattgcatttgcttgctccctatggaatcacccagaggggtgccttgccctggctgagggacatgtactgcctctcatctagaatttattttcctagcacttcaccacctccttcatcttctccttcaacaataaaccctgggatctttgcattcattttctgctgctgtctccacttgtgcagctgggtggcagcaccacatcaagggagtttatctgggaagaacttgccaaagattcctgttgaggtagcatgcatttattgtacaccatgcactgtgatagggaagggttacagagaacacacaagacaaagcccctgtccacagacagcctacagtccagttgatgagaacaggctaacactcatttatgagtcagaggcaattctgtgtactgactagaagaactgtagaaattccaggggctgaggaagggaggcacgaactggcccttgaaagatggagtggggttggaggtgttgccaagcacacagtgagaagactggtctgactgtggcagggggttggggctgagcttgggtgggttgagcggggagattttggagggttaaaagaagttctggggcctcaaaaacacagcgttgacctttagctaaagtcagagtctctgagttcagaagctccacatggcctcattcctcttctactctgggtgaatgtccttgagatgtcgcttcctgggcatatcagctggaactgatctggtcgcctgtagtccaaccatgtgtcaagccaatcagaaggatggactatggcggaacttctcacccatggactggtcctagtggaggctggacagaacccagctcacaggcttaagacctattgctggcaacctcctcaaagcctaaaaattgtttaatttttttaagagacagggttttgtcctgtcttccaagctggagtgcagtggcacaatcacatcttactgcagcctgaaactcctgggctcaagtgatcctcccacctcaacctctcaaagtgctgggattaccggtgtgagccaccatgcccaaccagaacagttttccttaaagaagcaggccattaccttcctctggcactcccaccataatctggaattcctctttactaagcctggggatggaactgagacctagccaagaatctgggaggggtaagagcagcacccactcacccagacctcctaatttggggctcagccccattatgtctcattgcaccacacagagtggaaatggggctgttcacagcgactagagctttgttccagaaacctacacatgcagctcagcaacagatgcttagtgaaaacttctgaaaccccagaaacagatctggggccccagaaatgctgtcctggtccctatttccagtcagattccctgtagcttaaaatccttacctggcttttaggccatttatttctttttcctttttttttttttgagacagagttttgctcttgttgcccaggctggagtgcagtgacgtaatctcggctcaccagtggcaacatccacctcctgggttcaagcaattctcctgcctcggcctcctgtgtatctgggattatagacacgtgccaccatgcccggctaattttgtatttttagtagagacagggtttctccatgttgatcaggctggtctcgaactcccgacctcaggtgatccacccacctcggcctcccaaaatgttgggattacgggcatgagccaccgcgcccggccctttaggccatttttatgctaggagttgtcagagacaagacttctcttggttgttcacttgttacatcctccagccctggttctcaggctcgggctgacagagggtccctgttttttaccttagagtttcttctcagcatcattttctgtaggtcatgagccagggccttaggccccacataccttctgggcctcagagaggttccagcagctgaaagacatcttagaggctgccaagcagggtctttattcaggactagactaatctgtatttgctcttctctttccatccaaccctcaagagccccccagctccattatagacctcggcctagggtctcccctccccaccagatattcagagcagggctggccttcagttcaagtgtagactgtgctcttgccctcacactcgagcttgtggatgatcttccactccggctttctaaagtacactttccttgcccagtagcaggattgcctctgtggagtgtcccaccaataatggtgacaactgctgttttcatcagctccagacccaaagagacctgaagtggggaagtgtgaaggaaggaatatgtgtcatccaggggggacccaactttgcctaagggcatgaggccggagcctcctttcctgaccttgtcacatgtggcagggtataaccagaatggtgaatccagcagacgggaggagtccctggcagtccagccagttctcgtggatgtacttgaggaaggtgcaattggccaccagaacatgcaggagtagaggttagagctcagccacagagattatcttcttgcagaaaacttttttcccccttcctaatcttgtctgctttgatagaagctggtactggctggaaaggcctgaaagcaggaggggacaagagtcgtcagaggctgggcaatgttcttgtttccggggagtgctgaggtccggcgggtgctgcccctgttctctcaaggatcccacgtgctttgtgtgttagagcagtgaccatcacctcccaacccaaggacctttgctgctctgcttcccacatgggactgccagcaccctgaaggcagaaaaactgaatgtacccgttaaaggaggagaagctggtggtgtatgttgagataaggagggtggggagtgtacagttacaggctgcacagggagggcaagatcaatgttgacaccaaagtgccaaaggctgtctgcgccaggtctggggcccccactggtcataccgcctgataaaaccattgcagtccacactaggtctggaggcttcgacacccacagcatgtgggtgttctcatgcaggccatgagtattcggggtgctttaagtgcaggggagttctgttgtccacgttattcttaaagcccagaataggccctgttttattctacagagataggaaggcactggggctcacagagtggtgctgcttcccaccctcacccttctgcccccacctgagcacagtgtggtgctcagtgatggttatcctatattccaaatacgcatggcccaggactggcagagtcggagctcggggtctagctgtgacctggggatcggttggagtagcttcttgaccagccggaattgggttaggtgtcctagcattggtgcctatggagaagaacacagactgtttatcactcacccctggttccagtaccaaggaaaggctggagccattgcaactggaggcccagcggaggaagggatcaagaagaggatgcagcccagagcccaggaccgagcatccaccggcctctggagatggcgtggtctccagttgcatcggggcttcagggcccatctgaagtgctgatcaaaccaggcagacacaccatgctggtgaaggcaggctttgtagatgcggggctgaattgagcagccacagaacctctgcagctctggggccagtggcagaacttctagaagtacctgtggggtgggaaaccccagccacaaaagcagtgagctgacttccaggcctgaggctttgcctgcaggcctcatctcagcccatgggacagattcctggtttttttagtttggccttggggtagatgataccttcagctgtccaccctgcaatacctcacctcctgccttctgacccagtactctgcagagcgggggaatggggccaggggacaggggcagggaagaggaagaagcaagagctgccagtgtgctccaaaccaagagagccctccacatgattctgggcacagctgaggaggagtgcaagctcaactctgctcaccacacttaagaagcaggcaagggaggatgaagggcaaaaacatggggtcctgaggcccttttactccctctaccctgctggaggtgaggatgagaggtgagacttcgttggactgtgctcctggccagttgatctcacccaactcattacatcagtagcctggtcacagggtggacactctgacctcttcttagcctttcattggcaatactaccagctctatatatgcccttatagggcctgaaccttggctcaggtggatgggcttggaggtaaaataattgaatgggtcaggggtaggaggagagatgagtctctgccaaggctgtgtgatgtgtcatctgagagagtgggtaacccctattcccagcacatggccatttatttagagccagggagggggacgagaattcatattcaaatgtgattctttcttaattactaccagttgttcaggtgagggaatcagggaaggccagattaataatccacacattgcccttgcacctcctgtcttggtttcctatcaaaacctctcccgtatctatgaacattccagccctgcaggtcagattgctggccaggagtagtctcacattctagctgactgatggcctcggcttctgctgttgtatgtggtttgatgattcatgctggagcctttggctataactctcttccctgtataagggccatctgaagtttgtctgcctgactccattacctggtgaatgagattggctagctgctgctcctgccccagctattcagtcatttggcaaatactcatttaaacaaagctccacagggatctctgagaaggagctcacctctaggcacacagaacctggacacagatgaaagtttgcagaatgacccagttgtgcagaagagacccactggctgctctcagtgaggccagggagagtcaaacagagcatcttggacaaagagagggcttgaaggccctttcaaagtgtcaagccagttggatgcacgggttgtgtggagtccaggggtacatccagaagcaatggcaggtgttatccattcattcaggttagacctctgagcagacggcagaaacgtcagccacaggtgagcataagctcaaacccccccattgaaggctacattcttgtcccacagggcagagcacatggcaagtggcatgctgactcagacaccgggcactgagaaaagtgggaagccatggtcacagactctacattcccctctcctgttggcctccatcccttcctcaaccgtccgcagaacacctccttccagcaccttagctcctgcctccctctggacctattcagtcctcaagggtgccctgctaaaggctgggctgaaagctaagaggagaggtggcattcaatgtgtcctgtgtcctccctggggttgattaaggggtcgatgcccaatagagtccttcatcttggtgttcagcccagggtccagctgccaagggaaggcttggcaatcaagggtgatggagataagaatgaaaaggggcaccaccctgtgccaaagctggcatgttgtatatctgagagaggagctgcctattcacagtgtagggttgtcaagctggaggcagggagagaaaagcaagagctttttggttcctcttgaggatagaatctataggaaaatgtaagagggttaaaaataaatttcccatgcatccaaacttttttctttggtagactttcttgtcatctatttaaaatgaaacaagtgcatgtacgtggttaagacattttagctaggaatgatggtgcgtgcctgtagtcccagctacttgggaggctgaggcaggaggatcgcttgaacctggaaggtcaaggctgcagtgagccgagatcataccactgcactccagcctgagtgataaaagtgagaccctgtctcaaaaaaaaaaaaaaaattaaagaagttaaacagtgccgggcttgggggctcacgcctgtaatcccagcactttgggaggcccaggcaggcagattgcttgggctcaggaattcaagaccatcctaagcgaaaaaatataaaaattagctcagtgtgatgatgtgcctgtagtcccagctactcgggaggctgaggtgggaggatcacctgagcccagggaggtcaaggttgcagtgaaccatgatcatgtcactgcactcactccagcctgggcaacagagcaagactgtctcaaaaaaaaaaaaaaaggaaattaaataaaaagaagatagcagtttcccacctcattcttctcaaactcctcttcagaggcagcgggttttgttttttttttaactatgtttttctactggctcactttattcctctaaaatagtaacttgtctatgtggtgccataacgggtccagtatctggacacgaggccgcactacctacacctttggggattctcggatcctgactctgagctacctcattcctagacacctggtgcaccacaatgtgtcagggatgtcggtttatgtgggatatttgcattttgttaggttgtgtgtggtagttgagcagccaagggggtagcatgcggtggatatttgttttagatacacagtaactggaaactcatttactgaggctatttggttaccctgaactactgtttctaccaaaaaggcaggataaatgctccctcaacacacacctttaattaccaattttcagagtaaggggttgaggtaatagccaccgccagttttccctttctctttgagtatcattatgagctcaaagttttttatatattcactatgattcaatcatgacagttgctatttttgatgctcaaattgccgcaaatctaatgtccaagtgttcttgtacttgtctaggcctagaatcttttagtgaagaaaaagtatttagaagacaaaaatcaggctgagtgcagtggctcacgcctgtaatcctagcacttgtgggaggctgaggcaggcggattgcctgagctcaggagttggagaccagcctgggcaacatggtgaaaccccgtctctactaaaatacaaaaaattagccgggggtggcggtgtgcaccttgtagtcccagctactcaggaggctgaggcaggagaattgcttgaacccaggaggcagaggttgcagtgagctgagatcgcgtcactgcactccagcctgggtggcagagcaagactccgtctcaaaaaaaaaaaaaatacgaaaaacaaaaaacataatctggattgcagggctgatcgttgctaatggagtgttatggctgttcagatgacagagggagaaaatgtactttgtaaactgttagttcaatgaggttatgattgcacaacaatgtgaacatacttaatgccactgaactttattgccattgataacttttaaatggtaaattttgtgtattattttgtcacaataaaaagtttgaaaatcgagttcataatatttccagtttgggccgaccacggtggctcatgcctgtaatcgcagcactttgggaggctgaggtgggtggatcacaaggtcaggagttcgagaccagcctgaccaacatggtgaatccctgtctgtactaaaaatacaaaaattagccgggcgtggtggtgcgcgcctgtaatctcagctactcaggaggttgaaacaggagaatcacttgaactcgggaggcggaggttgcagtgagccgagatcgcgccactgcactccagcctgggcgacagagtgacactgtctcaaaaaaaaaaaaaaaaaaaaaaaaaattccagattgaatttaatgtcacagagtttttagcctgtccacctgcccaattttgtattgtttcttttttttttttttttttttgagatgaagtctcactttgtcacctaggctggagtacaatagtgcgatcttagctcactgcaacctctgcctcccagactcaagtgattctcctacttcagcctcccaagtagctgtgattacaggcagcctccaccacacctggcaaatttttgtatttttagtagagatggagtttcactatgttggccaggctggtcttgaactcctgacctcaagtgatccacctcccttggcctcccaaagtgctggcattacaggcgtgagccaccacacctggcctgtgtctagtttctaatgttgttaatataagtagttatttacttattcaagaccagcctgggcaatatagtgagacctcaactctacaagaaaatttaaaaattagctgagggtggtggcacgcaccaatagtgccaaccattcagaaggctgatgtggaaggatcacctgagcctaggaggcagaggttgcagtgagccgtgatcatgccagtgcactctatcctgggtgacagagtgagactctgtctctaaataataataataataccagcactataatgaaaatactgagtcaagtttaaaaaaaaatttttttttttgagacagagtgtcactctgtcgccgaggctggagtgcagtggtgcgatctcggctactgcaacctccacctcccaggttcaagcgattcccctgcctcagcctcctgagtagctgggattacaggcacacaccgccacgcctagctaatttttgtatttttagtagagatggggtttcaccatgttggtcatgctggtcttgacctcctgacctcataatctgcccgccttggcctcccaaagtgctggggttacaagtgtgagccatcgcgcctggcctaaaatttcttcttagttctttttgtccacagagactatcctacaaagaatatacaatcaaggtgttgagtttaaggaacttgaaataattatttctctggtgtttatattatcaattaaatatagttaggtccatttgatgtgttttcaacttcagggttcacttttttctcatttaattttattttttggtaagatacaacataagagagtcacatggtgataagacagaatcagtaatagaatgtagccctttaatgccaccagaaatccagagagagaaataagctagggttttattcagtagcagagtaatctccatccagggtctgcttgaagccctagtccctctctgacaccacaaggtccccttggctacctgtcaagcctcctggggactccactggaaacatctcagccgtagacagcaatcttcctctcacactgcagtttcaagatgatctggtattctgctgggaaattttgcatggtgttctcaaaccaatatttgtcatcccagtaatgggaccaccttttgcaattgtcttccccaaaaccaaacaaggatacctgagagattggataagacaaaagatggtggtggtgtaacgggctggatcctgccctgcccccatggaacacctatcatgccttcagcaccactcactcaaccactagtgtgccaggcttcctcttggagctgggaggagaatggagttcaccttcttcaaggaagacagactctaaatactcatagtgaccccagagcccagaaaagagagcaccaactagttgttcttcattatatattgagagaagagaggattcccctgggagacaagggaagggcattccaggcagagggagcaaggtgtgagaaggcgtgaggcagctggtatgtttggagaaccccaagaagtccagtgcgggaatctgggagagaggagagggagagaggagaggggtcagatcatgtagggtgttgaaagctaggcagaaagttttagatttaacgggaagtccttgggaagacagattttttttttttttttgagatggagttttgctcttgttgcccaggctggagtacagtggcatgatcttggctcaccgcaacctccgcctcccaggttcaagcgattttcttgcctcagcctcccaagtagctaggattacaggcatgcgccaccacgcctggctaattttgtatttttagtagagacggcgtttctccatgttggtcaggctggtctcgaactcctgacctcaggtgatcagcccgcctcagcctcccaaagtgcagggattacaggcgtgagcccccatgcccagccaagaagacagaaattttgagtggcagaggagtgaaagtccgtgagttgcaggagatatcttacctggtcacaggtatgcaaggcatacaacagagccacaaactccaaggacggatactgaccatggttctccagccaactttcctggatatacctgaggaagtagaggctgatcaccagcacctaggaagatggagaaagggactgacctgaagcctgtcccatggctacccactatcatgttgtcctaccactttcccctttccttcctgggaccctcaccttatctttgctgtcttcggttccaccaggaacctgaaccgtctgaaatctaaaaagaaattgaggtttgggaggatttcagagtcatttgacaagcagacttcagccttaagtaagccttgggggtgccccagtatccagccagggtctctttggagttacctctgtcactccctacagtgacctcactccctgacatacccagggttttttttgcttccacatgcttgtctgtttatgcagtacacttatgaaccactccagaccagatgaattcaacggaagcagcagcagttgggtaccggggtcctgagggctggcaatcccagggtacataacgcgcatggtggtcctgttccccacatctgcctcaaagcctcagacaggggcctggttcatcctgaaaaggaagttaggatggtcatttagaggaggaaaaggcttcggcttggtcttcgtctccacctcctaccctgcacccacctgaggaccacttcatgttgattaatcctgaagccaaggccagagctccatagagaccttgagtttcccaccactgcacagacccggcagttggacaccacatggcccagtgggcacaggggaggtgctttaatcagctgctgctgcttattctcaacctccttctctgacttgaccctctcgagtccctaggagcataggagggaagaatttaggggcttgacccaggttccacctacctgtggaagaaggttagagcctggggccttgatggagagatggctaggacctggggttgggtcagggactggacaaagaccaagtttgcgcactgaccagccacaatatcagagcatcattggacgtgggatcttgtggcctctgtaggggttcaacggtactgtcgaagcgtctgtcaaaccagtcagactcgccaggcacgtggaggcaggcagagcatgtgtggacctcagatgagcagttgcattttctggaaaagttgctgggatggtggcagattcctgggtgtatcttggccatattacggaggtccttctggctggagtgctggtgtaggaaggaggtgatcagccacaatgaaaggacataggcagccaccaggcccaaactcctgtatcgaatcatgatctctggccctgatgatggtgcccctggcagacagtagattggccccgacacctggcaccgggaagaagaggctggggccacagaagtccccagcatcccccatcttaatggcttccatccctctcccaacccttgacattacacctcctcccaaaacctcgctcctgcctccctggccacctactgatcactactggaactgccaaagcctggcctagaggcagaaagaaagggagagaggacactttttgtgttctgtggcctccctgaggaaactgattcctaatggggtcttctgtgccagcccagtgatatcagggactcatcacagaggccacgttgtgacctactccaccaaggcccctccttcaccttggcattcagcccagtgcccagatgaccagggaggtgtggtagtcaagggtccaggggacaggagggcacagagggagaggttgtatccaggctggggtgggtgagcaggaggcaaagagggaaacagaagggccaccttggcgatggctcacacctgtaatctcagagctttgggaggccaaggcaggaggatcacttgagcccgtgagttcaagaagggccacctggaatcttctgaagagaatttactatactgatgaaagagaatatttgatacctttagcccttaacacctctcaggggtcgactttttctttttaagaactgtttttttgtggtttttgtttgtttgtttttttgagatggaatcttgctctgttgcccagatcttggctcactgcaacccccgcctcctgggttcaaatggttctcttgcttcagtctcccaagtagctgggactgcaggtgcacaccactgtgcccggctaattttttttttacttttagcagagacggggtttcaccatgttggccaggctggtctcaaactcctgagctcaagtgatctgcctgcctctgcctcccaaagtgctgggattacaggtttgagccactgcgcccggccaatccagtgtatatcttacacttatagtgtatctaaattcaaagcgttttgtcagaaatacatgatttataaatttcataaaattttacagtcaaaaaagatttacatacccaagttacaataagcatagtgaaaagttttctaagaactgaattgttttgaaatttagattaattaaaataaatttaaaaattccttcctcacttgcatttgccgcatttcaagtgctcatccatcatattggatggtacagaaatacaggctaatttaattctaaaagtcaacaatctactattagtgtttacattattgtaactagataaatatttcctatagagtttgtaaatgaactaagactacctttttttgttcatgataattttttttttttttttgagacagaatttcgctcttgttgcccaggctggagtgcaatggcatgatctcggctcactgcaacctctgcctcccgggttcaagcaattctcctgtctcagcctcctgagtagctgggattacaggcgtgcaccaccatgcctggctaatttttgtatttttagtagagacggggtttcatcatatcagtcaggctggtctcgaactcctgacctcaggtgatccacccaccttggcctcccaaagtgctgggattataggcatgatccactgtgcccggccttttgttcgtggtaactttctaagaaagggtgtgtaggagataaaacattctaagtttgcatgtctagaaacgccattattctgcttgcaggaggtagaattgtgttactttaaaaaaaaaaaatctttatgttctcacccctgatacttataaatgtgaccttatttggaagtagggcctttgcagatacaatgaaattaaaatgagatcatgctggatgagaatgggccctaatccaatgactagtgtgtttataagatgagggaaattggccgggcgtgatgacccatgcctgtaatcccagcattttgggaggccaaggcaggcaggtcacttgaggccaggagtttgagaccagcctggccaacatggcgaaacccagtctctactaaaatacaaaaaattagccaggcgtagtggcgggcacctgtaatcccagctactcgagaggctgaggcaggagaattgcttgaacctgggaggcagaggttgcagtgagctgagatcatgccactgcactccagcctgggtgacaagagcaagactccatctcaaaaaaaaagatgagggaaatttggaaacagaagacacaggggagtatgccatgtgaagttggaggtagagactggagtgatgcctctgatgcagggcaggcaatccccaaaattggggcttagcctgagagggttcttggctttgccctgatgcgatccagtggtgttagcaaactgtattgaagcagcattgcacagcagcagcagaggtacactgcttcttgtggacagggctaccccataggcagtgtgcccagagttagcagctcagcagcagctctgcaatcctatttatacccacttttaactacatgcaaattaaggggtgaattatgcagaaattttccaggcacaagcagtcctcctgcctcagcctcacaacatgctgggtctgagccactgtgcccagccaaaagtctgattttttattctttgttaactgtagcagttggattcttggtcttggtcaacagactggtaaacttcagagaaaaacaattcgccggctaaatatttagtagtttacaggatgatgcaaaagctagagaaccaggctcagtctatcatgagatgcaaaacatggccaaagactaccccaggaatggcccacctggaatgccaccactgctgccaacacaactgggcccttgacactgtggtagtctcattatggcagattctcttcagctctttccattaggaagagcagttcatttccccacttcttggatcttggatcactttatgacttgatctgaccaatggaatgctgcagaagtgacacggtaagtgctaggcacagtgactcacacctgtaatcccagcactttgggaggccaaggcagtaggattgcttgagcctaggagttcaaggccatcctggccaacatggcaagaccccctttctacaaaaacaaaaattaaaattaactgggtgtggtgacatgcatttatagtcccagctactcagggggcttaggtgggaggatcacttgagcccaggaggtcgaggctgcaataagccatgattgtgccactccattccagcctgggcaacacagcaaactcttgtctcaaaaaaaaaaaaaaaaaaaaaagcgaattggaactgaggcacctaaaaaaactgggaacctcaaaatgctaaaccttctgtgaaaagctgggcaaaaaaacaaaaaacaaaaaacaaccctcaccctccggcatgggtgaaacaaggaggtttacttcttttatcgaagtgggtaaagagcctcccccaacaactcaaagtctgggtttgcacttggcatgaaattgaatctaaacttatacctcctacatgatccagggcactaggcaaagaaatcaactcaaatattgcccctgagatctggaaggcacctctggcccatccctcccagacactgtggttacaggtaagacaatcaggccaggattttattcagtaccagactgatcttacaatttcctcctgccctttacccacccagaaataggatttgtatggactcagctaggctgagcttgtgtgaatagtgagcttgtccacacgctagctgatggatgacttcgatttctgctcctgcactagacgtgggcagtatttccttggagcccttggtctgattatcctccttccagtgatagaaacactttccttgctattctgatccaaatccaaagagggtgacctagtggataagagagggacatgtgcgtcagcaggcagactcctgtcctcacccctgcctcccttcactcagcatctaggatgacaggttgtccctgggagctgggaggagactggagctcacctccaggaaacagactctggacactctcctagagtcactgaggatcccaaaaaagagaatgtcaactcacttttcctcatggtattggaggaagagaggggaacccccaggacgtaagagaagggcattccaggcaaacggaatggtgcgagagaaggcatgaggcagctcatgtgtctggggaattctaagagcccattatgggagcctgggagacaggaggcaaggggaggagtcagaacatgtatagtcttttttttttctgagatggagtctcgctctgtcaccaggctggagtgcagtggcgcaatctcggctaactgcaacctctgcctcccgggttcaagcgattcttctacctcagcctcccgagtagctgggactacaggcatgcctggctattttttgcatttttagtagagatgaggctaccaccatgcctggctattttttgtatttttagtagagatggagtttgaccatattggccaggctggtctcgaactcctgacctcatgatccacccgcctcagcctcccaaagtgttgggatacaggcatgagccaccacgcttggcctacatgtagagtcttgaaagccaggcagaaaactttagactccatgctgaaggcattgaggagcaggaattttaagagaagaagatacaagaatctttcctgccggggcacagttgtgcaagacacagaacaaagccttgggccccagggatgaccctgaccctggtaagacagccagttgtcctggttgcacctggggaggaagggggagggaactgacctggggcccttcccacagcaacccacagccacatcctaccccttttcctattccccctcaccgtgtctttgctatcttccactccactagggaaccagaccatcttccaaaatctgagaaagaattggaggtgggggagtttgggccacaagacctgggaaagtcctgcaagtgtccccagtaagccaatagaaggtcttcccagagcccctgctgttactccctgcagtgacctcccctcacccccacacagagaatgtctggggacacctccatcaccttatcacttagagcatctgaagtccacaccaggtcagagagcttccgcagtagcatctccagctgcatccaggagccctggtcgctggcattcctgggatagatgaagcattgtgtgtggtttggttccccacgtccatctcaaagccctggacttggggcctgcttcatcttgggaaggggagcagaaactgatggaactgtggggcaggcctggccttcctgctcccgccctctccccagcacccacctgaaaaccacggggtattggtcgatgtcgttgccaaggctggagccctgcgggatctgtgggcgccccaacagcacacaagtcccacaatagaaatcaaaatggctcaccgagagcctgggaatccctttaaacagcttcctccacaatttcccaagctcgctccctgagttcatgccctggaaacagcaagagggagattgggggctgggcccaggggagagaaaacagagctgggtgggtgagatctccatccagaggctgtgaagacagggccaagggcagggatttgggcggaaagtgggagatgggtgaggcccggaaagcatgggggatatggccgggcccagtgttgaccactgaccaaccaccagagcacagtgtcagaggtcatagactctcttgtcctcatcaggtaccccatagtcttcctggagcacgcatcaagccagttccattcgtcggctgtgtggtggcaggaggagcagttgagggtctcagaagggcagccacacttcccggaactgaaccaagggcagtcgcaatgctgtggtaccaagtacattcgtttttcctggggtgctgattcaggtgtcagatccagatagggggtcatcagccagaggatgagcacccaaaagacccacaggacaaaaatctgccagcgcttcatgtctggcccaggcggtggctcccgtggtgggccgtagactggcttctctacctgtaaggatgaggggctgaggccacagacagcaccagcttccctctgtcctgtcggcctccacaactccccatcccaccaccttccacctccttccaacccctcctctcctgcctcactatccatttgctcaccctcaaaacggtctctgactgggcatggggtggaagaggccagggcagagagacagcatgtggctagtcctgagaggggaaggaatacctcagtgggggccttgctgtcatcccagttatatcatagatctcatcacaaagtacacattgtgacctccctcctttagcctgcctgaaaaaagccaccaccctaccctttctctgacaccgaaatgacctccactggatgtaagattcatgaggacaggggctgacctagtctctcttcttcacctctgcagctctaagacttagaatcatttaataaatatttatgggataaataaacaggggttgagagggaacttttttttttttttttgagatggagtttttgctctgttgtccaggctggagtgcagtggcatgatcttggctcactgcaacttccgcctgcctggttcaagcgattctcatgcctcagcctcccaagtagctgggactacaggcatgcgccaccacgcctggctaatttttatatttttagtggagacagggtttcgccatattggccaggctggtctcaaactcctgacctcaagtgatccgcccacctcagcctcccaaagtgctggaattacaggcgtgaaccaccatgcccagccgggaactttatttttaaattattattattattattattattattattattattattattattttgagacggagtttcactcttgtcgccccagctggagtgcagaggcacgatctcggctcactgcaccctctacctcccgggtttaagtgattctcttgcctcggtttcccaagtagctgggattacaggtgcccgccaccacgcctggctaatttttttgtatttttagtagagacggggtttccccatgttggtcagactgatctcgaacttctgacctcaggtgatccgcccgccttggcctcccaaagtgttgggattacaggcatgagccactgcaccccgccccagcctggaactttaaatatacttgtgtgtgatgccctctctggagttgtgtgacatcaactcaatcctctcttgtagtctctagaccccatatccaacagcctactgaattgccacttagatggctcagagacatctcacctgaataagcctgagactgaacccaggattttccctgtaaaccaacccttcccaaaacttctctgtctcttttgttttgtttgagacagagtcttgctctgtcacccaggctggagtgcagtggcgcaatctcagctcactgcaacttctgcctcctccggggttcaagcaattctcctgcctctgcctcccgaatagctgggattacaggtgcgtgccaccaagcccggctaattttttgtatttttggtacaaacgggattccaccatgttggccaggctgatctcaaactcctgacctcaggtaatctgcccacctcggcctcccaaagtactgggattacaggcgtgagccactgcacccagcttcaaaacttctctatctcaacaaatggttccaccacgtacccagttattgaaaccagaactcatgtgttattaattcctcctactcctatgatacccaaattctttttttttttttttttttaggacaaagtctcactctgtcacccaggcaggagtgcagtggcacaatcttagcccactgtagcctctgcctccaaggttcaagcaatcctttcacctcagcttgccaagatgctgggactacagaagtgtgccaccacgctaggcttatttatttatttaatttatttttgaaacagagtctcactctgtcgcccaggctggagtgcagtggcacaatcttggctcactgcaacctctacctcccaggttcaagtgattctcatgccttagcctcccaggtagctgggactacaggcgcacaacaccacacctggctcatttttgtatttttttggtagaaacggggtttcactgtgttggctaggctggtctccatctcctggtctcaagcaatccgcccacctcggcctcccaaagtgctggaattacaggcgtgagccaccgagccttgctgatttttttttttaagtagagatggggtttactgtgccagccctgtctcgaactcagctcaagtgatccaccctcctcggcctttcaaagtgctgagattacaggcataagccactgagtctggcctcaaatccattttttaattcgtttctatttctaagtcatcttcttcatctccactgccacccccttaattcaattgtagtcttgtaaagatagtaaaaaaatgaaaatgtttgagttgtttttaaagtttaagaaaaaaacagaacattttggtttttaaaaaaaatcaaaacattttattcaatgggataagaacagtaaaattcttcatcttaactagtggaaagctgcactggatattgtatagcttttaaatcaattcacccaaatatctgagtaaggtgtgtaggctagttaattatatcataccaacgtcaagttccaggttttgaaaaagtaccatatgggctgggcgcggtggcccacgcctgtaatcccagcattttgggaggcaaggtgggcagatcacctgaggtcaggagttcgagaccagcctgaccaacatggagaaaccctgtctctattaaaaatacaaaattagccaagcatggtggcgcatgcctgtaattccagctactcgggaggctgaggcaggaaaattgcttgaacccgggaggcggaggttgcggtgagccgagatcgcaccactgaatgtgattttagctgggcaaaaagagtgaaactctgtctcaaaaaaagaaaaagaaaaattactatatgtattatatggtaagacactaccattaagagaaaatgaaggccaggcacagtggctcgtgcctgtaatcccagcactttgggaggccaaggtggggtttgaagcttgaagccaggagtttgagaccagcctgggcaacacagcaagactctacacacacacacacacacacacacacacacacacacacacacacacaaaattagctgggcttggtggtgtgcgcctttattcctagctacttgggaggttcaggtgggaggatcacttgagtccaggagttaaaggctgcagtgagttatgatagcagcactgcactccagcctgcgtgacagagcaagactctgtctctaaaaaaaaaaaataaagcaaaaataaagaataaaatgggaaaatggatgatgggtacatgggaattttctgtactatttttacaatttcttgtgtgcctatggttttttcaaaatgaaaaggttttaaaaattatctaccagcctgggcaacgtagggagaccctatctctataaaaaatataaaaattggccattgtggtcccagctactcaggaggagactgaggtagggaatacttgagcccaggaagtcaaggcttcggtgatatgtgattgcaccactgcactccagcctgagtgacagagtgagaccttgtctcaaagaaaaaaaatcatttaggaaaagatgtatagcaagttttattgctatttcatttacatcaactgctacaatttttttttcttttttgagatggagccttgctcttttgccaggctagagtgcagtggcatgatctcagctcactgcaacctctgcttcccgggttcaagagatgctcctgcctcagcctcccgagtagctgggactacaggtccgagccagcacgcgcagctaatttttgtatttttagtagagacagggtttcaccatgttgaccaggatgatctcaatctcttgaccttgtcatctgcctgccttggcctcccaaagtgctgggattacaggtatgagccactgtgcctggccaactggtataatttttaaaatttttgtaaactcataaaatttaccattttaaccattttaaaaatattttggccgggtgtggtggcttatgcctgtaatcctagcactttgggaggctgaggcaggcggattgcctgagctcaggagttcaagaccagcttgggcaatatggtgaaaccctgtctctactaaaatacaaaaattagccaggcgtggcggtgtgtgcctgtaatcccagctacttgggaggctgaggcaggagaattgcttgaacccaggaggcagaggttgcagtgacctgagatcgcaccactgtactccagcctaggcaatggaatgagactctgtctcaaaaaaaaaaaaaaaaaaatatatatatatatatgtgtgtgtgtgtgtgtgtgtgtgtgtgtgtgtgtatatatatatatttttattttatataatatatataaaattttattttaagttccaggatacaggccaggagcagtggctcacgcctgtaatcacaacactttgggaggccaagacaggggagggggatcacaaggtcaagggattgagaccatcctggccaacatggtgaaaccccatctctactaaaaatacaaaaattagttgggcatagtggcgcgtgcctgtaatcccagctactcaggaggctgaggcaggagaatcgcttgaacccaggaggcggaagttgcagtgagctgaaatcgaggcactgcactccagcctggtgacagactccatctcagaaaaaaaaaaaaaaaaagaaagttccgagatacatgtgcaggtttgttacgtaggtaaatgtgtgccatggtggtttgctgcacctatcaacccatcacgtaggcattaagccctgcctgcattagctatcctgatgcgctccctcccactggcctgcccaccaggcaggccccagtgtgtgttgttcccctccctgtgtccatgtgttctcattgcattttatccatttttttaatgtgcaaccatcatcactatctagtctcagaacacattcatcattccaagcatactctagtgaataatacattgaataagactagaatcaattacatgacattcatatccccactacccattttttccagatcttagcatttctttgcttttgctgttctggtgtttaggtatgaatatatgttcatttatcctgttacagtacattcaggcttcctaaatatgagaactcttgcctttcatcaattctgggtaattctcagccatttctttcaaatattgcctctcccttattctcagtatttcctcctattaggaaactcctattaggcaaatgttggattgtttttctttctatccttcaagtatctgaatctctcttttacatctatgattttatttctctatattacattatgggtaatgtttttcagctccatctttctgttcaatatttctctctctctctctcttttttttttttttttgagacggagttctcactctgttgcccaggctggagtacagtggccccatctcagctcactgcaaccaccttccaggttcaagcagttctcctgccttagcctaccaagtagctggtattacagacgttcatcaccatgcctggctaatttttgtatttttagtagagatggggtttcaccatgttggccaggctggtctcaaactcctgacttcaggtgatccacctgccttggcttcccaaagtgctgggattacaggtgtgagccactgcacccggccaatatttctctctttaactgtgcctaattggttgtttagcccttctactggtttttaaacttaaatgactatttttcatttctagaaattctttgaaatgtactttcactttttttttttttttctatggagtctcgctctgtcgccgaggctgatgtgcagtggtgcaatctcggctcactgcaacctccacctcccaggttcaagcgattctcctgcctcagcctcctgagtagctgggattacaggcgtgcgcctgccatcttgggaaagtcagttcacctcttggcttcctcatctataaaatgagacttgaagtagcacctaggctgcgcatgcgctggctcatgcctgtaataccagcacttttggaggctgaggcaggtggattgcctgaggccaggagttagaaaccagcctggccaacgtggcaaaaccccatctctacaaaaaatacaaaaattagctgggcatggtggtgtgcacctgtaatcccagctactcaggaggctgaggcatgagaattgcttgaacctgggaggcagacgttgcagtgagccaagatcacgccactgcactctagcttgagtgacagagcgaaactctgtctcaaaaaaaaaaaaaaagcacctaactcccacgttgttttgagggtgaaatggattacagcaatgggcatattgtccatgttcagttagtattagtttctccttgtctttgctccttccttggtgagctgcggtcaggctgccacagtcacccaactccagggtccctcctcttcctttttatggaagcattccctaacccagcatgttagtcaccttcccttacagactcccatggtccccctgtgccacctcttatcaaagttttgatcttaagtcattgaatgatttgagctatgcactttgaaataaaacagactggagtttagatattagcttattagccactcaaagcttttaatcagggataataatagcagttagcatctaaggttgttgtttttgttgttgttttgtttttagagacagggtcttgctatattgcccaggctggtctcaaactcctgggcttaagtgatcctccctctcctgcctcagtctcccaagtagctggaactataggtgtgtaccactgtgcccggcctaaggttgttgtgaagatgaactgacatgatataggtgaagataaaagagtttacaacagggcaggtgcggtggctcatggctgtaatcccagcactttgggaggccaaagcgggcagatcatttgaggtcagagttcgagaccaacctggccaacatggtgaaaccccatttctaccaaaaatataaaaaattagccaggtgtggtggtggacgcctgtaatcccactactcgggaggctgaggcatgagaatcgcttgaactgggaggtggaggttgcagtgaactgagattgcacaactgcactccagcctgggtaacagaatgagaatctgtctcaaaaaaaaaaaaagagtttaccaccatatttgccacatagtagtggcttgacaaatgctaggtattttttttttttgagatggagtctccctctgtcacccaggctggagtgcagtgatgcgatcttggctcactgcaacctctgcctgccgggttcaagccattctcctgcctcagcctcccaagtagctgggactacaagtgcacgccaccatgcctggctaattttttgtatttttagtatagacaaggtttcactatgctggtcaggctggtctcaaactcctgaccttgtgatcctcccacttctgacacccaaagtgctggaattacaggtgtgagccactgcacccggccaatgctagctattttaaaaaattattattattagctattatttttatttttattattttattaagggatatattaatatccataattaggactgtaactttctttctttctttttttttttttgattcggagtctcgctctgttgcccaggctggagtgcaatggcacaatcttcggctcactgcaacctctgcctcccgggttcgagcaattctcctgcctcagcctcctgagtagctgggattacaggcgcccaccaccatgcccagctaatttttgtatttttagtagagacggggtttcaccatattggccaggctggtcttctggcctggctggtctcaaacttctgacctggtgatccaccctcctcggcctcccaaagtgctgggattacaggcgtgagctaccgtgcccagccaggactgtaacattcttgaaggcaagaactgttctaattcaactctctcttcccaggactcaacacagggcagggacacagtgtgtgtgtgtgtatatttgagtgttgcttgcatacatggatattacattttaaaatctgaatttagtgcaatttttaatttttattttttaataatttttattttattttatttattttatttaattttcagacaaagtttcactcttgtcctccaggctggagtgcaatggcatgatcttggctcactgcaacctccacctcctgggttcaagcgattctcctgtcttagcctcccaagtagctaggattacaggcatgcgccaccacgcccggctaattttttgtatttttagtagagatggggtttcaccatgttggccaggctggtcttgaactcttgacctcaggtaatctggcctcctcggcctcccctagtgttgggattacaggcgtgagccaccacccctggccttttttttaaagtatttttgatacagggtctcactctgtcacccaggctggaatgcagtggcatggtctcgggtcactgcaacctctgccccccacccctgggttcaagcgattctcccacctcagcctcccgaatagctgggattagaggcacccgccaccacacccagctaagtttttgtattttttggtagagatgggattttgctatgttggccaggttggtctgaaactcctgacctcaagtgatccacctgccttggcctcccaaagtgctgagattacaggcatgggccaccgcgcctgggcttagtgcaatatttgaggcactcagattttttttttcctgtgctgctggttttggtcctatgtgggcaataaaacaaggaacctttcaggaaagtacttctcacactttaatgtgcatgctaattatctggagagtcttgttagaatgcagattctgattctgcaggtttggggtggggactgggattctgcatttctaacaggttcccagataaggccaatgtttctggttcaaggatcccacttagggtagcagagctttagacttaattccatcagcagattccttattacctatttctgatagaattcttggtgctctcaggaatctgaagcccagataatagagggagatcccaggtgtcctctgccaccctgttagctgagggagacccaaaaactttggcttccgtgaaaagtcctcctccagttgtccccaaagttgtagcatgagtccttccaaatcttttctcatgattatacaaatacatattcccccatataagattaagatttttatatatagatagattttttttttatttaggtttttttttttgttttttttttgagacggagtgtggctctgtcgcccaggctggagtgcagtggggcaatctcggctcactgcaagctccacctcccaggttcacgccattctcctgcctcagcctcccgagtagctgggactacaggcgcccgctactacgcccggctaattttttgtatttttagtagagacagggtttcaccatgttagccaggatggtcttgatctcctgacctcgtgatccgcccgcctcggcctcccaaagtgctgggattacaggcgtgagccacagcgcccggcctatgttttacatatataacaatttatatataactacatatataatatatataacagtttatatatatatataacagtttatatatataatatatataacagtttatatatatatatataacagtttatatatataatatatataacagtttatatatataatatatataacagtttatatatataatatataagtttatatattatatataacagtttatatataacagtttatatataatatatataagtttatatataacagtttatatatataatatatataagtttatatataatatatataagtttatatatatgtttatatataatatatataacagtttatatatataatatatataacagtttatatatataatatatataacagtttatatatataatatatataacagtttatatatataaaatatataacagtttatatatataatatatataagtttatatatataatatatataacagtttatatatattatatatatatatatgcacacacacaaagagagagagagagactcgctctgtcgcccaggctgtagtgcagtggtgtaatcacagctcactatgaggcaggagaacagggaatcagggtaaccgggggttaagacataagcaaatgaaggggtgcagccagttctaggcagcatacaggccacatcttcaatcctatgataacgagacagaagtttccacttccgcctccgattgaccgtggggccaaatctccacttcagcctctgattggctgtgggccaagtctccacttcagcctctgatttggtcgcaggccaatccttcataggtgtagccaactggaggcttctaaagggcacctaggggtgttgccaggtccctttagcttaatacaaaccctgattgaggaggctcttgagcagcttgctctaaccagctgccgctatgaatcgtcttcaataaatctatgcttttgttattccgttcttctgttgctgtttgtctttcgttgcccttctgttactttatgtgttttgttcaacacgccaagaacctggacaactctatgctggtaacaactgcaggtaacctggtaacaactgcagtttcaaactctcctgggctcaaccccagcctcccaggtagctgagactatagacgcatgccaccacacctggctaatttttttatttttatttttatttttggagacagaatctcactctgtcgcccaggctggaatgcaatggcatgatctcggctcactgcaacctccgcctcccaggttcaagcgattctcctgcctcggactcacaagtagctgggtttacaggagcacactaccacgcctggctaatttttgtatttttagtagagatggggtttcaccatgttgaccaggctggtctcaaactcctgaactcaagtgatgcttcctggctcggcctcctgaagtgctagggttacagatgtagtttttaaagtttttgtagagtggggtcttgctgtgttgcccaggctggtcttagactcctggcctcatgtgatcctcctcggtctcccaaagtgctgtgattacaggtgtgagccattgtgcccagcccaatttttaattaaaaaatggaatgatggaatgcacattactttgcatcttttcccccttaaaaatacattcttagtatacctaaaggagtaaatctacctcattcttttgaaaagtggcctaatattccatagaatgggtgtatcgtgatttattcaatttatttaatgtatcagtgggcattctggctggttccagatttttgccattgaacaatctcatgcatacatctttatgatgtggtgcacttaaaatctttaagagacagattcaatatcttaaggtgtaacaaccacccagatcatggtacttttatccttatattaaaatttttttctgttaaccttggatagctgcttacatattttttctttttcaaaatttttctattaaccttgacatggtgcttttacttcctaaagtggaattcctgtatgaaagcctatgagcttttatatcttactcattgcagctgcattactgtgggagctgtccctctagagacactgggctgcaatgggaagtgtcagggagagcttaagctccatatcacttgagtctaaacctggagggatagagcgtgtccgtgaggatcccagggcctggagagcaatttagggtaatattcagaaagcagcgctcaggagaagcactgggacgctgtttaggtaaaatcaacccaaaagaccctgattcccagagtactttgaggtccagaagaactgggctggaagcaggtcctgctattaattggctgtgatcttgggcaagttatttaacttctccaggtcacagtttgctctttggaaaacggagataagtcacacctgctttcagggcggacacccttactttacatcagaatcatccgatgccattcctagcgtttcggcttcagtaggtgggaatcaattatttgcatttctaataggtaatcagttgataatgatgcggccggtccggtacactcgaaaaaccactgttccaggatattccaagatgttccaagagtcttaaacacctggtgcagttccgagcacaaggcacacgaacggtgctattagcgtttctaaccccgcagagaactcctcgcaccccagtcctcaaaatcccgccccggacagcggaggccggggcagtagcttccagacccaattgcccgcgcaagggggcgtggcagcatcgttgggcggggccgcctgtaagagaacgcggctaaaggtggggccaagcgtgcggtttgctgcgcctgcgtgaggaaaaagaggggggcgtggctccaggccggaagagggagtctgtaggggcgggccggctggcgtcccctttccggccggtccccatggaggcgctggggaagctgaagcagttcgatgcctaccccaagactttggaggacttccgggtcaagacctgcgggggcgccaccggtaggccgcagcggggccggggtcgcgtggaggggggcgtcctagagcttagcccgggctcctggactctgactggcctgccggtgtctgagggagcggattcgaggccattctgaccctcgccccttgtcctgcagtgaccattgtcagtggccttctcatgctgctactgttcctgtccgagctgcagtattacctcaccacggaggtaaggggcggggcttagtgcgtgggcggggcttggcattctaggagtaggacctttaggggtgggagtggggaaggagaggtttggggctaagtcttactgaggtagcgctgccccaggtgcatcctgagctctacgtggacaagtcgcggggagataaactgaagatcaacatcgatgtactttttccgcacatgccttgtgcctgtgagtacctcaccatgggtgggactggagagacccagggttctcatgtgggctgccagattcacacctccacccttaggttctggactggaccccaggacaacctccttctcctcatcccgttctgccccaagacaggcccagtatccccttcccctccaaaacccacatccccttgtccctagggtcccagtaccttagcctgattttcctgcttccagatctgagtattgatgccatggatgtggccggagaacagcagctggatgtggaacacaacctgttcaagcaacgactagataaagatggcatccccgtgagctcagaggctgagcggcatggtaaccaggggagggggccgggtctcagatcccaaagctggatgtacccaagcctatctgctagcaagtgaactgtggcaggcatagtgatacattaaacaactaagagctagagaagtcaagtgacttgcctagggtcccccagctagtaagagtcagagtgagctaaaatcctctatacatatcgagtcaggtaatctacctggctattattctcagaggtcctcaatacctgcagatggtagtttgaataccagaggtttgaagataggtcttatgtgctcttgccttggtagaactgtctagatggacccaggcttctttgagtgtttgctttcccagcccattggcttaattcagcccttaatgctcttcccctttggaatgcaggtggtttaatgagaatttaggttctcaagtcagattgcctgggttcacatctagctttgtctcctgcagtctgtgagcttcagctagaaagtggtaataaaacagtagtaccaaccacatggaattgtaagatcaaatgaagtcatatgtgtaaaatgcctggtacagagtgggtacccacttttaccttcctttcctttatcttggtggcttcccaattcccttcgttaactcagtttcccaccacagcaaactgtcctcaaagctgggatttctaacaccttagagattactctggtggggagttttatcattcgttgtttcagcagattaatgcaggacaccagtggaaccaacataatttgctataggactggatgtggagtggaggagagcaaagtcatggttgttgattccaacgctttcagcctgagcaaatgaatgacttgagatggagatgactggaggagaaggtttttttggtgggagggaggagtggctattggatatccactgctgtgtaacaaagtactccaaaagttagtagtttgatacaataaaaatgtgttttttcagtttccctgggtcaggaatttaggagtggcttgtttgggtgattcgggattagggtatctcacgaggttgcagtcatctaaggattgatggggcactgaagaatctactatctatctatctatctatctatctatctatctatctatctatctatctgtctatcttgagacagagtctcactttgtcgcccaggctggagtgcagtggcgcgatcttggctcactgcaacctccgcctcccaggttcaagtgattctcctgcctcaacctcccgagtagctgggattacaggcctgtgccaccatgcccagctaattttttgtatttttagtagagacggggttgcaccttgttgggccagatggtcttgatctcttgaccttgtgatccacccgcctcagccttccaaagtgctgggattacaggcatgagccactgcgcctggcctacttatttgttgtttaaatttattttttttctgtcaaggtgttctttatttcagagagagggcaggacagggggctcagtctttcttggcatcagctttcctcatgatggctgggacattgctcagctcctcctgcctcctcttagtgcggatgtgcgtccccactcttttcttgatgaacttgagggcccgtttgtccttggagaccttgagtaacaccatggcgtgccgctcatacggggcgaaaccacacacctctcggatcatgtcccacatgaatttggtgtttggtcaggcgcccgcggcggcagctgtgcctgggcttgctcatgttcttggtcatcttgtggcccttgtcaaggcacacggccatagtgggtagcacagagccatggctgctgctctccaatggcagctgtggcagaagggctggtgccacgcggggatctactttttttttttttttttttttgagtcacgctctgtcacccaggctggagtgcaatggtgcgatttcagctcactgcaacctctgcctcccggcttcaagtgattcacctgcctcagccttctgagtagctggggttacaggcgcctgcccccacacccggctactttttgtatttttggtagagacagggtttcaccatcgtggccaggctggtctcaaactcctgacctcaggtgatccacccgccttggcctcccaaagtgttgggattacaggcatgggccaccacgcccagcaggggatctgcttttaaagggctcactcatagggctgttggcaggatgcctcagtgcctcaccacatgggcctctcagtagggttgcttgtgtgtccttgtatcacggcaactggcttcccccacttggatcttgcaagtgagctgagagaacaaagtagaaaccataacctttggccaggcatggtggctcacgcctgtagtcccagcacttttggaggctgaggcagttggatcacctgaagtcaggagttcaagaccagcctggccaacatggtaaaaccccatctctactaaaaaatacaaaaaaaaaaaaattagccgggtgtggtggtgggcacctgtaatcctagctactcaggaggctgaggcaggagaatcacttgaaccagagaggcagaggttgcagtgagccgagatcacgccactgcactccagcttaggcaacaagagtgaaactctgtctcaacaacaacaacaaaaaaacgtgtaaccttttttatgacccagcctcagaagttgtacaccatcatttctgcaatatactagtgcttacacaggtcagccttactcattgtgggagaggactacataagggtgtgaatactaggaagtggggatcattgaggacatcttggaaactagcttccacagagtaaggtcaggatttgcaggaaagaggaatctcaggtttggggtatgttaaatttggggttcctattttatactctggtgatattaagaggcaattagatgtaccagtctagaatttagaggagttatcagcaggtacagggtagtttaaacaactggactaagaaaacctggggagtcaatgtaggtagaggataggtctacggcctgtaccctgggtatctccaatatttaaaagtcaggacaggaaggaagattgggacggattagccattgacgtagaagaaccaagaggtgtcccaaaagccaagtggagagagtttcaagaagagagagtgagcagttgtatcagaagctactgatagtccagtaaaatgaggagtgagaattgaccattgaaattagcaacaaagagattcctggagactttgaaaggaacaattttgatactgttgaggatgaaaatcggatcaaagagcaaaaaaggaagtggagacattacctataggtgacttgggagtttcactgtaagggagagctgagaaatggagtgggatctgaaggagaaagtggtgagatggtgggtttggtggtgagagcaagtgaagttctgttgcttctcttttcttagtggaaattgaaagcaaggacattagctaagtgaagaaataggagggggttttgggagcctaaggagagaggagaaggtctaagtcaccttagagagtgggagagtgaactgattagagaaatgaagtggaattgccaggcagtcctaaaggagcttcaggaaagaagtaggtacagagagttgaatggaaccagggtgtgggttttgctggatttgtaaatgaaagacgagaggaacagggagttgtggttatgtgcaagagaataattacagtggaccatgggatttcaggagggaagtgaggacgtgatagtgtcagcagtgtcaaagaattggtggatttcgggtactaaatagtgaacttggaaaataagggtaagtagttgaagactcagacacttgaagttgaattttggaagatttgcagttattggcagtgacaggatctaggtatgagtatgaaaatgggtagctgaggtgagatggcaaaatcaaaagattatcatgagtcgggaggtcagtattcattattgaaatcaccagttatgatggggtgattagagtgaggcaaggagccggtgcagagggagaggtgtgaggagaagcaccatggcaagaggttagtggcatacacgttggaattagctgaaatctgtttcctcggttgcattgggcaaagtcacttctcatcagtgagcctcaacatcttctcagtaaaacagggataattaccgccaccctcaaagagtcattgtggggatgaaatgagatgatggttgtgaagtacagtgatctgtacacagctaatgttcagtatttactgttgactgttttcttactgtttcttttattaaaagaattgatatgtgtgtagaagtgcttaatgcctgacccgtagcatgtactatatgaatattagttattataacttttattatccctaagcaaagggcttgtgcagactggagccaccgatttcactgtgtctggccccagctgatgcctctgcttctcccctccccttagagcttgggaaagtcgaggtgacggtgtttgaccctgactccctggaccctgatcgctgtgagagctgctatggtgctgaggcagaagatatcaagtgagctggcggggagcgggagcagggttcccatcaggcgccatctgtcagtcagcctcagcctcagtcagactgtggcaggtggggaggtcagaccaagaatctagagtgggcggggtatgtgcctctgtcattgatcctggtgcaagcgactgaggctttgtaaccaggccctatctgggagctgcagacctagagatgaagctgaagtggtctctgctcttccacctagagaaatggttcagaggtggtctctggagtccagttacctgggttctacccgtttccttgggccaagccatgtaacctctctatgtgaagagggatgataataacatcttctcgtaagagtcacatatggattagctgtatactgtgtgtaaagcactgaggtggaaggcccagcccagattattagaccctcagtatctgataactgctgctgtttcccagaccctgacttctgcaagactgattcagcaggtctggagtggggcctgggaatgtgtacttaaatttttttttattgtgggaaaatatgtgacataaaatttaccattttaactatttttaagtgtgcaactcagtggcattaggtatcttcacagtgtcatgcagtcaccactctctgtcctaaaacttgtcatcgcctcaaacagaatgggaatatgtatttttcacagtcctagtctgggcacaatggcttacacctgtaatccgtagcactttgggaggccgaggtaggtgaatcacttgagctcaggagtttgagaccagcctgggcaacatagcaagaccctatctctaaaaaaattttaaaaattaaaaaaagaaaacagtccttctgccactgaggaaacacatttggagaatgtttggtggtcagggatgaggctagcagagccttcattagcaggcagagctgctcgggctctatttccccagatgccagcactggacttatgcctctttaacactctcaccgtcactccctgccctacaggtgctgtaacacctgtgaagatgtgcgggaggcatatcgccgtagaggctgggccttcaagaacccagatactattgagcagtgccggcgagagggcttcagccagaagatgcaggagcagaagaatgaaggctgccaggtgtatggcttcttggaagtcaataaggtatcaggagggatcaagacaagatagggccagctgggctgggcaagctccactgggaaccgagggcccagtcaggccctgagtaggcaaaaggaggacacagccagtgaatgagagagaatgttccttacaggtggccggaaacttccactttgcccctgggaagagcttccagcagtcccatgtgcacggtgagtgatctgcactagctggggagatttagatgctggccaccttcttggtgagcttgagtggtcctcttctgcctgctgctcatttgtcttgggcaaccatttggccagagcaggccttcatctcagggcagcagtttggcacagtggctaagagcacaggccgaggagccagactgcctgcattcagataccagtttcagaccttactggctgtgtgactttgagaaggtttcttaatctttttgactcctgttttctactttataaaatgttgtgagggcacttatctcacagggtgtgtgtgcaggttaaagatgatagcacggagcctggcttgtggtaggtacttgttgaaatggtagccccccgtgtccgatgatgacctgtgcatgaggctttgggagaagcagagctaggttggagcacaggttctgccacacctgggctatgtcatatttgggccctatttagttgcttcttctgtaaaatggggatgatgataatagtacccactcacagggctgttggggtgaacaaatgagatttattctcattcatttgttcattcatgcattcacaaaatatttagtaatcacctactagtctagttgctaagggtacagtagtgaacaatctgtgccctcagaacattctagtaaagaaatagacaataagtatataaaatataaatagtccccaattaacaatggttcagcttgcaatttttaacttcatgatgggtattacatgcatttttcacttaacgatattttctttttcttttttgagacagagtctcactctgtcgcccaggctggagtgcagtggcatgatcttgactcactgcaacctccacctcctggattcaagtgattctcctacctcagcctcttgagtagctgggtgtacaggtgcgtgccaccacgcccagctaagttttgtatttttagtagagatggggtttcattatgttggccaggctggtcttgaactcctgacctcaagtgatctgcccgcctcggcctcccaaagtgctaggattacaggcatgagccaccgcacctggccgacttacaatattttcaacttgcaatgggtttattgggacgtaaccccagtgtaggtcagggagcatctgtatatggtatatcagatgctgttaagtcatatggaccaaaacaaggcaggataaagatggtaatggggaggggctagggtagggcagtgagggtcctattttaaatatggaggtcagggaaaaactctttgatgaggtaatattttagcaaagacctgaagacagtgagggagccagccatgtggatgtctggggaggaagtgttacaagcagagagaacagcaaatgcaaattcctaaggctagaatgtgcttggcaagttcaagatacagtaagaaggttagggtggctggagcagaggagcatgcttagaaatgaagtgagagaggccgggtgcagtagctcatacctgtaatcccagcactttgggaggccgaggcgggtggatcacctgaggtcaggagttcaagaccagcctggccaacatggtgaaaccctgtctctaccaaaaatacaaaaattagctgggtgtggtggcacacgcctgtaatcccagctactcgggaggctgaggcacgagaatctcttgaacctgggaggtggaggttgcagtgagctgaaattgcgccattgtactccagcctgggtaacagagtgagactccatttcaaaaaataataataaataaagagaggtcacagggccatatcatgcagggcttgcaggggcattgtagggactcgggccgttactctgcatgagatgagaagccattgtagggccctgaagaaggtgaggcatgatctgacttaaaagctctccagctgctctgtggacaagactgggcaggggaaaggacagaatcagagaggcccattaggaggcagttgcagtgatcaatccaggcaaaagatggtggggcacggcccagagtggcagtggaagtggtgggaagtgactggcttctggatgtattttgaaggtagagctgagaagagttcctgatgggcatgagggataaaggaaaaaggagtcaaggatgcctccaaagttttgtacctgagtagtaagaaggatggagttgcctgtaatcctagcactttgggaggccaaggcaggtggattgcctgagctgaggagtttgagaccagcctgggcaacatgatgaaaccttgtctctactaaaaaatgcaaaaaatcagccgggcgtagcggcgtgcgcctgtagtcccagctactcgggaggctgaggtaggagaattgcttgaacccaggaggcggaggttgcagggagccgagattgtgccatttcactccagcctgagcgacagagtgagattccatctccattaaaaaaaaaaaaaaggatagagttgccatttagcaagatgagggagactcagggcaggtttagatgttcggaaatgggatcgtacagctggtattcggcttttgacgtgttcagaccaatagcatctgggtgtccttctagacacccaaggtgtcaagtaagttttccattcaagcctggagttcagggagaggacttgcctggagatgcagatgttggcatcatcagcatgtgtatagagctgtgggactggatgaaatcaccctggaggtgagggcagatggagaagaagggaagctcaaagggctgggtgccaggcctcccacattagaggccaagggtgtcagggggaattggtaggggagactggaggaggagtgtaagctgggaatgtggcatcctgccagccacggacgggtgtttcaaataccacatcagatgcttctggatgtcaagcgggaattgaccatggcatgtacatgcaacagtcacttatagccttgactgagtcatttaagggtgtgacaggaccaccctagagtgggttcgggagggaatgggggaggagttggagccagtattgacagctctatagtggaaattgcctaggggaggagagagcatgagctgaagctagagggaaatgtggagtcgagggaggcttttctaaggagggtgatgtagcagaatgttaatatgctgttggaaattatcgactaaagagcataagtgatgctccagagacgagacagtgaccggagtgaagtcctggagaaggagaaagaagacagaatctagtgccttacatatgtggaaagtccaaacttagcaccaggaggaagggcaggctctgtaggtacaggtagggtggtagctggtgtggcagaagtacatggagagtctcttctgagtcttcccatcttctccgtgttgtaggaaggaaggtcctcagttgagaatgaggagagagggaaggaggtgttggagatttgaaagaagaaaagatgtgactggtcacttgggggtggaagagtgcgtggactggggagattgagtaggattgatgcagccctagggcctccctggagtccgcggctgtgaatgcaaagagagcggtcagcatggttgtctgtgtgggaatggactcagtcaacagaacattgcaattgcatggggtttggtgttgccaggtgcctgcaaaggtgagggagtcaaatatgtaaagaactcatcttgattctggaccacagcatatgagctaggaaaggaggaaagacaggatgtggagaagccagtgagggggcaggaggaaaaagggactacaagtcctgagtgtagtgtcaacaagttattggaattggggaactggaggaaattagaaagctggtggagcatgagttgcttgaaattgaagtcacagaaggggctttgttaatgacaaagtttagggaatggccaacagagcaagtggcttgggtaggcagagcacaagatcagggaggaaaggatgtccaggaactgggaggcccgggtactggaaggatcatctacgtggatatggaaatcactagaacgtgtgacagaggtagtacaggagagagtgacaggcagttgcccaagctgttgaaaaatggcatgggaaaactgttctggaggttccatatcgatatctaggtgactgaaacaagcagggctgctttgccctgagcttcaaagctggggattttttttttttttttttttttttttttgaggctggagtgccatggcacaatcttggctcactgcagccttgacctcctggactcgagatcctcccacctcagcctctcaaggagctgagaccacaggcacatgccaccatgcctggctaatttttttttttttttttgcagagacagggtcttgccatgttgcccaggctcctgggctcaagtgatcctcccgcttggccccccaaaatgttgggattacagatgtgagccattgtgcatttttaaggcagataaagggaaagtgatctggaagtggcagtaaggagcaagaaagacttctctttaggccagggaagaggttgtgtatggagagaagatagtcgcacgttgaggggatgccagggagttagtgcctgaaaggaagagccaggctgaagcaagaaagtgaagaggaacccaggggttgaaggcagggttggggaaggtgggagttggtgtcacagtaaaggatggacagagctgcacagtgacagagcccagggtatgaagatggcctctcaaaatggttgaagtgaacaggaagaaagggccccctggagggtagctctgctggtcttcagggcaatctgtgggggtggggctgtgttggggaggggccagtgtgggggctggaggaccctgcagagctctgggaccccctcttcactctggaggaagctgggagaaaagggtcttgctgggagggcaggaagatgatcagtgtcaagctgttggcacaaggtctggcgggcactcagtagacacacagccagagtggcagcctcttggcctgggactgttagacttgtggatccccgggccgggggtgctctgtatttggaaggatgtataaatgcaaaggtacagttgcccaaggccagagatctggctgaattgaggcctgggagtgagtttctaacatccttgttgattggggctggggtgggtaataatctcttacagtgtaaagtttacaagtatttttccatcttagatcccacgtgatccttaggacagccctttgcaaaggagaacactgaggcccagaaagggcaactgatttgcccaaggccacacagtcaggaacttggctctttgagctctaggcctcttgtccttctaggccactattttgctcctctctggccagattagttcactctcgaggaggggcccagaaggaggcttgttagctggggccagactgtgttgctgaggctgaatgttccagtcttccctcctgcaacatatcttgctctcatagttctcattgtgaagctctgaatctttcttctctctcctccctcccccatgctgcagtacatgctgtggagagtaagtggccctgcccccatggaggccaaacccctacttctggggcagcctgccctactagaatggcggggaggttggatggggctgtgattgggtctcctctgacctggctgctgggtgactgtaaaaggtctgggatgtatctttgaagtatggttccttgcagcaggagggattgaggctagagggcaggaataaattgttctggaacagttggtacagggtccccatgggatttcttctggggagctttgagggtggaggcagggaaagtgtggatggcattctcagatcccacctcactttgaggttcagtgatttgccatcagctctagttagtgagagcccatagtcggtgggttttgtttccggagatgcaggcagggccatggtggtagtcaaggcatagagttccctgtggacgtcagggaggaaccagggtctgttctaaagactcctgaggagggcgtgaactctcacacaggcccaaggcttgccctttctggctgtccttaagcaggaccaggaggtgccaggctggagaaggaatgaggggcagagaagacaggtggtttgcagtccagggggaggaaggaggaggccagtgctgctcctactaatgacgccttctcccttgccttctcccttctctcctagtccatgacttgcagagctttggccttgacaacgtacgtaccagatggaaaccatggagggcaggtgggggtgggaggcttggttgctgccttcatttccttgtaggaacatcctgggatggggtagtgcatatggaaaaatacaccacgttctgaatggggatccagcctgagggttaagcgagagtgacttttgaactgaactctgagcaggctaggggcaagattggggttggataagagcatcctagacagacagagcctcagcgcaaggtcaggcgggagcatggcccttctaaggaactgcggggcaggtgtggatgggtgaggctggagaagtcggcagggaccagaccacaccggactcagaggccacgctgaggaatcacatctttctcatgagaacagtggaaagctgttggccttctttaagcaggatcacgacataatcagatttgcattttaggaaagatccttctagtgtctgaggctgatacacaagggagcaggaagggagtgtatctgggggttcacagcctccagcctaggcctccaggcaaagccagcacctgctactctgtgtgcctaacgtacaagtgaagctggtattttaagaaatctggaacctggccaggcatggtggctcatgcttgtaatcccagctactcaggaggctgaggcaagagaatcgcttgaataaggcgaggctgcagtgagccaagatcatgccactgctctccagcctgggcaacagagtgagaccttgtctcaaaaaaaaaaaaaaaaaagaaaaatctggaaccccaggagtttgcaggctgtggaaggaggagtttctaggcagggaatgggggattcttatctcggggaggttgtccccttaggaccatagcctccccttcctcccacatctccgcagacggacccaggtgtccctgtctgctactgtcatcagagctttggatgagctctggatggtgttgtttacagatcaacatgacccactacatccagcacctgtcatttggggaggactatccaggcattgtgaaccccctggaccacaccaatgtcactgcgccccaaggtaccagcccgggaggcagcccccagccgcagaaggccggccgggcacccatacccagtgctttgttttcccctcagcctccatgatgttccagtactttgtgaaggtggtgcccactgtgtacatgaaggtggacggagaggtgagtcagggagctccctaccagagtctcctgcgcggtgccaagcactggagttcctgcatttcgttccgtcagcctggggagtgaaagctgcctcgtcctcacatggcgaataaaagactgaggcacagagagggtgggggatttgccctcccaggcagagtgcaggcctggggctgttagatttaaagcgcctgctctttctgctgccctcaccgcttctatccgttcctccggtgcccaccgtctgcctgcctcactgttctctgtggtctgcctgggctgggggttaggcaaggcaagtctctgtgtacccgctcccaaggctgccctggcctgtggagcagcatctcagcagagtggcaggatgcgaggggctgagggcagaggaagtcaggtcagccttggtgcgtctttggagagctgcttctcagcctggacccccgtgagaacacccaccaaatgctgccaggataggtaaactgtaaagacttggcacctggaggggaaggctgaggccaagactaggagagggggtctggcgggccaggccttgcagtgcaggccactagcacggtgctgtgttctctccttacacggccaaggctcaacaggaaaggggaaggagcaggggtggggctgatggtggctggagccaggtcctagccctagccctggcccaggctcccctcccaccccaggtactgaggacaaatcagttctctgtgaccagacatgagaaggttgccaatgggctgttgggcgaccaaggccttcccggagtcttcgtcctctatgagctctcgcccatgatggtgaagctgacggagaagcacaggtgaggatgggggcaaagcggcctctgggggcctgggcctgagggaggaggatgcctgctgagcccaccctctccttctaccaggtccttcacccacttcctgacaggtgtgtgcgccatcattgggggcatgttcacaggtaagaggcccagggcgtctgtgagctgtggggtggggagggtaaagcctgggtgccccaggtttggttgggggtgaaggggcagatgctggcctggccagttaagtgacaaggctctcagcgtcaaaagccaaggcccccactgggccagtgccagcccttgtctctctcccagtggctggactcatcgattcgctcatctaccactcagcacgagccatccagaagaaaattgatctagggaagacaacgtagtcaccctcggtgcttcctctgtctcctctttctccctggcctgtggttgtcccccagcctctgccaccctccacctcctcggtcagccccagccccaggttgataaatctattgattgattgtgatagtactcactggtctccgtgtgatccttgccatggccagagcctcatcctggccactcattgaaggcaattgtgactgacagatcggggcccagagccctcgggagccccacatgggcatcccctagttaaccggggtttattcaaaccaggttcatgtccagcccacagccctgtcctgggtccctcctccactgtggtcctcaggcctctcgggttcagccccagggctcagatggaccttttcagcgtgagcttcctggagccaccatggcccccaggctcatgagtgatcaaccccaggccactaattcagggccctgagtgcatattggggcttgccacttcttcattgatgggtaaagctggggccgctctccgccaccctgggctcaatacacctgatcctgtcacactcactgatcccactctgtgccaaaccccacgctggctctcactgcagagaggaatccctccaggtcctctgcagtctagatggaagcaaaactgaacactgaggtgcgaaagtagcagtcagtggccattctggagcagggccagcaccagacccctggcttggagcctaatcagggtttcccattagaactctggatccatgtggagaaccagggcccagcaacctcaccagtccacagcctagggaaccaggggtacctaaacagccagtcagtttatcagatcatgtctcgaatgttgatgcaagactgtggcaggggaaaagcgagagagaggggaaaggaagcgaagtcaggtagtgacagcagaacttttagctctgatggaagcctctctcagggatggtgaggaatggacaggttaatggagtccgtcaggtccttagctgtcctggaggggtggaagccagaaacagattaggtgagagggacctggccaccagcaggagcaggagcagtggtggagtgggtgtgataactcagctgccggggcccttttcttccctgtggtggggatgggggcagccttccatccctgtgcattcttcaagtccccagcacctgaggtcacccaagaacatctctgttctttgccacctggtgccggccttgtatagcacgtgatcacaggtcagtggctgtgataggtttattcagaggaagcactagactctggggtagctcacatgggtaagaaagacttccaggagcaggcattgaagggttggcaccctgggtgagtgtccaaggtcagcgagagtcacttgtggaggggacggaagatgacctggctgatctggccagggatggtgtagaagaccaggaggaggaagacggtgagcagcaccagtagcagcagcaccagggtgcgccagtaccggcgccagatgaagaagacaaaggtcttcagcgggttcacaaaccagttgaaggaagttttggggcggctgttgaggagaagagtggtgtcaggatgaggaggaagccccttgaccacccccacctccccatcggcccaggctgtggccccagccccggtgcctgactcacctgggtttctccagaggctctggctgcttccgccccttccccactggccgtttctcggcctcctccacagtcagcagctcaaactctgcctccaccttgccctaaaaaagacattcctgcatcactgggagcagggggcgggctcaggccccagctcagcctggcctctgcccacgggcacccaccgtgaggatgtacacattgccacccatgtctgtgaactccaggtcttctggccggcccttcctcctcctctgctttcgcttcttcttgccagcctgagcctcctgcgcctcccgctccacgtcctctgcctccttcagcttcactaccggccaccagcccctcaggcggcggcagcagcgaaacagattgcacctcggcccggccccattgcgggccagctgcacagagcagagctcggggccccgggccccacgcaccatgtctggtagctgcaactccagggatcctgcaagtccagagcacaccagattaggcatgggatcaaagtctcattgtgccaggggtgaggaggcaacacaccaaggttgtaaattggggcattgaaagttgttgcagtgtgcggtcaggccacagctatagaccacccagaccacagcccagcggtccacccattgctacttcccagtggaagagggccaagggtcgggatcagagtgccaaggaccaaaggctgtggagtcggtgtcagggtgacaagctagggtcaaatcagagttgaatcagagactctgggtgggaatggaggttactgtggtctaggcctaattaactcagtaattaggccagaaagcaaaggtttcacacctcgggtccaaaatcccaagattcaaggttgggtcagagtagggaactgggggacggaagtgagggctggaggcaggggcggaggtgagggccggaggcaggggctgagggtggggaaggctaagcattgtaataccaaggaagtcattggcagagatgcggtcatagtcccagacctgcaggaccagcactgcaggctgccggaactccgcctcctccagggcaaagggtccagacctgcgccggacgctcacctcccgctccgtgggcaggtagtcaaagcggaacacaaagcgccaattgaagttcccctccccagtcagggagttgaagtgaacgtctgtctcctgcttgtcatgctccaaccccttcacccagctggggccggggtgggtgagcgtcagggctggagctacatggagaacccactcctcaccccgctctcagcaccacggagggcctggggtcggggctctggactcagcccgagggcccacacccatttgcaatccccctagtgcaccgccgttgccccacccggccagcagcctacctcttcacatagatgtcactcgacatctctccggtgagtggattctcgtcgtccagaaccacatcctccgtgttccagatgacaactctgagctcatagctggggggcacattagggggtggcttcagactctcgagtggggccctaaaaggggctgcaggaagcaggagggacctgggccggggccactgacattcactggacacctgtgtgcccagcaggggaatccaatgcctgtggtcccatgaagggaagccccaggtgtcactgaccaccctggccacagcagatggccccaggaatggtctgtggggccagcgaggttctccttcccgtgaatttagaatcagggcgctgcactgttgcatggtgtggcatcagatgcaaagctggagctaccacaagccagagtttggggatgtagaaaagtgagtgaacagaaagccagtctgcagggagaagagggaggatgagagatgggggacaggagcatacagcgcctgagggacaggagggctgcgacactctggaccctacccgcatatagccctgtctttgggggccatggggttgcctggatagctgttttctccagcccagcatcaatttcccctcatttgttgacagcaccgtgattttctgctggtgacccacccccaccccaaccacccctccccaccaccactgtcaatctatggaattctggtggggcaggcccctccctccctggctggacggggtcggggagacatcactggactggccaattcgagtattacagccccctaaccacaatgattggttcttcagggcacagcatttgacccaagctggtcggctgagtcagccctgaggcttttgctgtaactgggaaagaggtgtttgtttctgctcaagtggcctggctgagatgtaagcctcgcactgttagatgccactttgcccccagccctgcagagggctccctgagagcgacaccaaggaaagcagagcccagaggcagaaagtgacaggctgctgatatccgagcatctgcattcagccctgtgtgaagtggctgtgacccacacacaactccactcagatgagcttaggtgggaagggggcttaccaaaaggtacttggactcaatttacaagagacactcaacttgcaatgcttttgaataacagggaatttaatgacacctaactgaaaagcctgtgatgagcaacctctgcctgcttcactggggacccgggttttcagaggagccttgtacaggtagaccaggatgtgcacccgccttgggaggaggcgacagaactctcacctgattggctgccgaggcttgatgtcaactgggggtggagcaggcacatcttgaggaaagatgtcaatccacatgtgaagagatccctggggggacaggaccaggctggagggtcttgccaggctcccaaccttccctgacagccctatggccacaggctgtgccttgtccccaagtggagaaaagagctagggtcaaaatgacagggtcgggtagatcctgggggatgaggatgaaggtggagtctgaagtgtgggttccaggatcaaggttagattaggggttcaaggatgaggtccaggctgggcgcggtggctcacgcctgtaatcccagcactttgggagtccatggagggtagatcacttgagctcaggagtttgagaccagcctgggcaatatgacggaaccctgtctctacaaaaaatataagaactagccgagtgtggtggcagacgcctgtaatcccagctactcccgaggatgaggtgggaggatcacttgagcctgggaggtggaggctgcagtgagccgagatcatgcacctgcactccagcttgggcaacagagtgagaccccatgtcaaaaaggaaaaaaaaaaaaaatgaggttccagaaggggaagttgagattaaaagtaatatctggtgttccaaggtccagatcttagggatctggggggaggtcaggttaggaaccccacatctgagtcttggggcccgggggtggggatcctgtaggactagggtcagggtgaaggtgtggtccaggatggaggtccaagatgagcagggacacagggaccagcaacaggagctgcagtcaggagctgcaggtggcacccaggtggacatcttggggaaaggctgtcctgggggcccagggtccaggatcaggtgggtgtcctgggattctaagagtcttgtgattctgggcctgggtgctgagccctcccacacctgtagcagccctgggctgtggggatggtagagaggcctggtttctacatgctcgggtaccagctggatcccaaaacccggcatttcctgccagcgccgcagcacaagcaatgcctgggcctcttcagggtccccgctcgccactgtggggctgctgctgcctgaagcaagaggtgtgtgagcttagggctccacacagtttccatctctcctcccgccctcccccgccccgcccccccaacagaagctctaagctggggaagccactgtgttggataaagccctgtggactaggagagcagctctgtaatgcacaaaaagtgggagacgctgctataactttgcccagtgaaaagccagcagtcagtgggacagtgggattggaggtactgccacctttgcctagaccctatttagagaataagccaccagagcaggcacactggctcatgcctgtaatccgagcacttttggaggccaagatgagaggattgcttgagtccaggagtttgagaccagtctgagcaacatggcgaaacctcatctctaccaaaaaaaaaaaaaaaaaaaaaaaagaaagaaacttaggtgggcgtgatggtacgtgcctgtaatcccagctactcagggggctgagatgggaggatcacttgagcctgggaggtccaggctccagtgagctgagatggcaccactgcactccagcctgggtgacagagcaagaccctgtctcaaaaaaaataaataaataaaaaataagcctccagccatttaattctgcagccacattctgttatatggggcgctctatgggacctctgtgttccgggaacttgattagttatgggtccactttggctctttgggggaatctcacactcaccaataaagactgttttctccctaatacccaagaacctcgtccttactcaaccaaattcacatctacttgctgaagaaatgggttattttggggagcacacaagactgggccccctgtaccttgttctaccgacatcttgcttgaacagaaaggggctgatacctgggggcagggtctccggtggtgtcaggaagactttgctgcccaccttgacagcaccggctcggtattcaggggcagggaggccacagcgttggcacagccccgccaggatctgcgaaggccagaatgcatcacgccaggcattgtaaccatctctacaggcagaaaaagaagatgcgtcagctggggctggtgtagggacacagctgggcctggggcagtgatgacgtcatgaagacatgaggtctaggttcaaaactcccaacgggagacaggttagtcctcatttatgataacaatgaatgaaaaaaatgtagtccaggtgcttccattaagaagatactgatcttattacctctgttttgcagatgagaaaacagacttgaagaggttaagtgggcctggcatggtggctcacacctgtaatcccagcactttgggaggcagaggtgggtggatcacttgaggtcaggggttcaagaccagcctggacaacatggtgaaaccctgtctctactaaaaatataaaaattagctggacatgggggcccacgcctgtaatcccagctactggggaggctgaggcaggagaatcgcttgaacccaggaggtggaggttgcagtcagccgagatcgtgccactgcactccaacctgggagacagagcgagactgtttcataaaaaaagaaagcggtcaagtgacattcgttacaggatcccgactcccaagcccaagtcttgaccactgagctatgtcttggttggcagtggcggtgggtgggagggtccccttccatgaaatcataggatctggagaacacaaaagggaatgtgagcttgaatgtgtttggccagaaactcagaatggctcctgtgggccctgctggacccacacttcatactgggaggccagcccacagtttgctctgtggtggctatagaatcggttttccagatcaatgtgggtctccccgatgaggtcgtcagaacccacgaggtcatgatcaaatacggcgaccgtcagctccgtctcagctgggagagagatgcttagctccaggatcctggcaaggagggagagggactgaggtcacttccatgctccaggaggtggtctggggaggaggcgggtgtgtcagcatcccctgtccattcccttgccattcctaggccagctgccacaaggccacagggctggatgctcctgcagctaccccgtttccaccccacagggcccagcctcactctccaaagatggggttgagctgcttggggatgtagcgttccttggtgtcctgccgctcccggccagcgctcaccaccacgtaagggtctgctttgccattggggtctgcaggagccaggttggtagcctaggggaacagcatggagtggaactgagagaaatgtcattatgataacccaaggttacctttgtaggacctaatttcccattgggtgaaagcaggaagttatcaaggagagatctcccactgtgaggagctaatggagaggttggacaagatgacttttattttcaattagttatgaaatagttaagtcatacaaataggtataacaaaaagtgtaatgaaacaaaatattttgaaagatgtataacggacttactattcaactcataactttctatatggtttgacttattttttaatttatgaatttttttaatagagatgagggtctcactatgttgcccaggctggtctcaaactcctgggccgggcgcagtggctcacacctgtaatcccagcactttggaaggccaaggcaggtggattatttgcagtgaggagtttgagaccagcctggccatcatggaaaaccccatctctactaaaaatacaaaacttagccaggcgtggtggcgcacacctgtagtcccagctactcaggaggctgaggcaggagaatggcgtgaacccgggaggcggaacttgcagtgagccgagattgcgccactgcactccagcctgggcgacagagcgagactccgtctcaaaaaaaaaaaaaaaaaaagaaagaaagaaagaaagaaattacatcctgtgtagtttttttccccccctttttatagagacaggggtctcacactacattgccaaggctggtgttgaactcccggcctcaaatgattttcccacctcagcctcccaaagtcctgggattacacagtgtgagcctctgcacctccagccctgtgtagtttcttgactgaaagttgttgggtgattttttcaattgttgtttgcctaaagaggtctttcatttttttctctcttgaatgagtgtttcctgggacacacaattcaagggtgatagttatttttctctcagtgctttgaagatattattctatttttcttccagcacttttggttgctgtagagaagttgatgggctgactgtcattccattgtggtaatctgtactttctctatgatgatctttacatctttttaatttagagattgggtcttgttctgttgcccaggctggtctcgagaactcctggcatcaagcagtcctcccacctcagccttctgagtagctggggttacaggcatgagccactgtgccaacttgatttttttttggtatttatattttccatagcacttatgctttcttcttttttttttttttttttttccctgagacagagtctcgctctgttgcccaggttggaatgcaatggcatgatctcggctcactgcaacctctacctcccaggttcaagggattctcctgcctcagcctcccgagtagctgggattacaggcacatgccaccacacctggctaatttttgtattattagtagagaacggatttcaccatgctggccaggctggtctcaaactcctgacctcaggtgatccgcctggctcagcctcccaaagtgctgggattacaggcgtgagttatcacgcctggccacacttatgcctctctaacgcactgaaacatttacttattttgttaatgtttgtttctcctactagaatgcagtcttcataaaggcaaagctttttttctccttgtgattacatattaattttattctttgaaatctctttcttctcttgtcctgtccaaatcctacttagagatactcagtcaagccttaatttcctgtgctggctcggctcagtggttcatggctataatcctagtactttgggaggctaagacaggcaggagctcaggagttcgagaccagcttgggcaacatggtgaaatcctgtctctactaaaaaatagaaaaaattagctgggtgtggtggcatgcgcctgtagtcccagctacttgtgggggctgaggtgggaggatcgcttgagcctgggaggtcaaggctgcagggagccgtgatcatgccactgcaccccaccctgggcaacagagtgagaccctgtctcaaaaaaaaaaaaacccgcgaatttactgcagagacagtaataaaggagtatggtagtggcataaacatagatcagtagaatagaactgagagtccagaaagaaatccacatatctatggtcaattgatcttcaacaagggtacctagaccattcaatgggaaaagaaccatctctccaacagatggagctgagacaactggacagtcacatacaaaagtatgaggtcagaccctcacctcacactagatacaaaaactaaccccaaatggatcacagacttaaacatgagagtcaaaactcaaactcacagcagaaaacaggcaaaagtcttcatgaccttggattttgcaaaggtttcttagctataaccaaaaagcacagtcaataaaagaaataaaaatagacttcatcaaaattaaaatctcttttgctttaaaggacactatcaatagagtgaaaagacaacgtagaaagtgagaaaatatttgcaagccatataaaaatctagtagccagaatatacaaagaactcctacaactcaacaacaaaacaacaatctaattttaaaacggacaaaggactttagacatgtctccaagatatacaaagttctaaaaaccacatgaagactgttcagtgtcattaggaaacaaatcaaaaccacaattagataccactttatacccactaagatgatcttaattttttctttttcttttttttttttttttgagtcagagactcgctctgtcacccaggctggagcgcagtggcgcggtctcggctcactgcaacctctgactccagggttcaagcgattctcctgcctcagcctcctgagtagctgagattacaggcgcctgccaccacgcccggctaattttttgtatttttagtagagactgggtttcaccatgttggccaggctggtctcgaactcctgacctcgtgatccgcccacctcagcctcccaaggtgctgggattacaagcatgagccactgcgcctggcctgacattcatttttttaaaaggacaataaaggctaggagcagtggctcatgcctgtaatccctgcactttaggaggcctaggcgggtggatcacctgaggtcaggagtttgagaccagcctggccaacatggcgaaaccctgtctctactaaaaatataaaaatcagccaggcgtggtggcgagcgcctgtaattccagctacttgggaggctggggcaggagaatcgcttgagcccaggaggaaagggttgcagtgagccaagatagcaccactacactccagcctgggtgacagagcgagactctgtctcaaaaaaaaaaaaaaaaaaaaagaaaatgtaagttatattctggcactcctttgctcagaaccttcctatggcttcccatgtaattcagaataaagtgaataacaaaacccaacatgatctgctttctctgcccatcactgctccatttcctctgaagccttaattcctaaaacctgttcatttatcctgcctgctacggccacaaggggccccttgttgtttgtcacacacgagtcatggttctacctgatggcctctgtaccagctgttctgcctggaatgctttctccctcaggtagccacctggataactccttggccccctcctagtgtgtatttaagagacagggtctctctctgtcacccaggctgaactgcagtggtggcatcacagctcactatagcctcaacctcccaagctcaaacaatcctcccatctcagccttcctagtagctgggactacaggtggaagccactgtgcccaactctagtatttgtttaaataacactttctcagccgggcatggtggctcattcctgtaatccagcattttgtagttcgagaccagcctgggcaacatagcaagacctcgtctctaccaaaaaaaaaaaaaaagtcttattgaggtctatcaactccgaccatccatttgcaacccacccccagcactcccccatccctttatcctgacatattttctccacagcacttataattttctaacatataaataagatatataacttttttttgttttgagatggagtttcgctcttgtcgcccaggctggagtgcagtggtgtggtctcagctcactgcaacctctgcctcctgggttaaagcaattctccttcctcagcctcttgagtagctgggactacaggcatgtgccaccaggcctggctaatttttgtatttttagtagagacgggttttgtatgtttagtagagacaggagttcgggctgatctcgaactcctgacctcaggtgatctgccccctcctcagactcccaaagtgctgggattacaggcgtgagccaccatgcccagcccgtaagctatataatttacttattgattatggttattgttcatctcttttcactagaatgtaaagttcacgagggcactgattttcatctgttttactcactgctttttatcaccagtacccagaacactgcctagtacctcataaaaaatgcaagaaaggccgggcacggtggctcacacctctaatcccagcactttgggaggccaaggcgggcagatcacctgaggtcgggagtttgagaccagcctgaccaacatggagaaaccctgtctctactaaaaatacaaaattagctgggtgtggtggtgcatgcctgtaaaccccagcttgaggcaggagaatcgcttgaacccaggaggcggaggttgcagtgagccgaaattgcgccattgcactccagcctgggcaacaagagcgaaactccgtctcaaaaaaaaaaaaaaaagaaaaaaaaatgcaagaaatacctgtggaataaatgtttgtgagtgaaactggcctagaattatactttctcatgtcattcttctcaggttttgcatcaacattatgccaccctcatggaattaactggggtatttctttttatattctctgaaatggtttgtgtaagattaaaattgtttcatccataactggtggaaactgctgctgagaccatttggtctggagtttctgacacaatttcttttaatacttatagtactattcaggttttctggccaggtatggtggctcatggctgtaatcccagcactttgggaagccgaggtgggtggatcacttgaggccaggagttcaagaccagcctggccaacatggcaaaaccctgtctctactaaaaaatagaaaaatcagccaggcgtggatgcaggcacctgtaatcccagctactcaggtagctgaggcaggagaattgcttgaacctaggaggtggaggatgcagtaagccaagattgcaccactgcactccagcctgggcgacagagcaagactatctcaaaaataagtaagttttcttcctttttttctggcacactgcatcctcagtggctcaagcaatcctcccacctcagcctcctgagtagctgggacaacaagcaggaaccaccacgtccaggtaatttttattttgtttttattttttatttttttttttgagacagagtctagctctgtcgcccaggttggagtgcagtggcatgatctcagctcactgcaacttctgcctcccaggttcaagcaattctcgtgcctcagcctccctagtagctgggactacgcacatgccaccatgccctgctaatttctgtatttttagtagagcattggggtcttaccatggtggccaggctggtctcaaactcctgacctcaggtaatctgcccaccttggcctcccaaagtgctgggattacagaggtgagccactgcacctggcctaacttttaaatttttttgtagagatagggtctcagccgggcacagtggctcatgcccgtaatcccagcactttggggggccaaggggggggcgcggatcatgaggtcaagagttcaagaccagcctgaccaacatggagaaaccctgtctctactaaaaatacaaaaaattagctggatgtggtggcaggcgcctgtaatcccagccactcgggaggctgaggcaagagaattgcttgaacccaggaggcggaggttgcagtgagccgagactgtgccacagcactccagctggggcaacagagtgagactgtgtctaaagaagaaaaaaaaagtggacgttgtagtgaagggattgggaggagattcgtggatgtaatgaagatacagcttagactacaggctgtatctattttacaggggagagccaaaggataagacagctgggaggagctctcctggggttaaaacaaatatcaaacactaacctcagaaagtattcattggaaagagccaccatttgattagatttatttgtagaggattttatgctcccaggatactactgcaaatgacagagcaataagtagagcttaactgggtgtggtcagggaaaagaatgcaagagggccctaccagtaccactgtcatcctagggtgacagtggtatatccaaagctgcacctgccagagtagcaacatcagtgatctaacacaggggatgggaaatagactttgctaaaataatccagccagtcactaaacaaataaacaagcaaataacaagaaacctcagtacccagagttgctatcatatattatctaaatgctgtttccaacaaaaaattatgaggcctgcaaagaaatagaaaaattatttttccatccaccccccaaaaaatgcccgtgagagcaacacaatgttgaacttaacaggaaagtatgtatgtgtgtgtgtgtgtatgtatgtatgtatgtatgtatgtatctatctatctatctatctatatatatatatatatatattttttttttttttttttttttttttttgagacggagtcttgctctgtcgcccaggccggagtgcagtggcacaatctcggctcactacaagctccgcctcctgggttcaggccattctcccgcctcagcctcccgagtagctgggactacagtgcccaccagcatgcccagctaattttttgtatttttagtagagatggggtttcaccatgttagccaggatggtctcgatctcctgacctcatgatctgcctgcctcggcctcccaagtgctgggattacaggcgtgagccactgcgcccggccgactggaaagtatttcaaagtagccagtgtaaacatgttcacagaactgaaggcaagcttgattagagaagtaaaggaaggtatgatgataacgttgcatcaaatagagaatatcaataaagagatatacatttttttttttgtttttgagagaatctcactctgtcacccaggctcgagtgcagtggtgtgatctcagctcactgcaacttctgcctcccaggttcaagcaattctcctgcctcagcctcccaagtagctgggactactggcacatgccaccacacccagctaattttttgtattttttttagtagagacggggtttcaccgtgttagccaggatggtctcgtctcctgacctcatgatccacccgcctcagccccccaaagtgctgggattacaggcatgagccaccacacccagccaagccatacatttttttaaaaagaaccaaatgaaaattcttgagttgaaaagtacaataactaaaatttaaaattcactagagaggctcaatagtagatttgaacagaagaaagaattggcaaacttgaagctagatcaaaagcgattatgtaagctgaagaacagagagaaaagagaaaaaagaaaaatgaaatagagcctcaaacaaatgtggaacaccattaagtacaccaacacacgtataatgggagcattaggaggagacagagagctgggtgcagtggctcacgcctgtaatgaggcaggcggatcatttgaggtcaaaactttgagaccagcctggccaacatggtgaatgaaaccccatctctaaaattagccaggcatggtggtgtgtgcctatagtcccagctattccggaggctgaggtgggagaatcacttgaacccaggaggtggaggttgcagtgagctgagattgtgccattgcagtccagcctgggcaacaagagtaagactccatctcaaaacaacaacaaaaaaagaaggcaggctgggcacggtggctcacacctgtaatcccagcactttgggaggcccaggcgggcggatcaccggaggtcgggagtttgagaccagcctgaccaacatggagaaactctgtctctactaaaaatacaaaattagcaggatatggtggcacatgcctgcagtcccagctgcttgggaagctgaggcaggagaatcctttgaacctgggaggcagaggttgcagtgagccaagacagtgccattgcactccaacctgggcaacaagagcgaaactccgtctcaaaaaaaaaaaaaaaaaagagctagagagagagaaaagaagaaaaaagaaagtctgaatatccaatactatcattacttttgttgttgttgagacagaatcttgctcttgttgcccaggctggagtgcaatggcacaatcctggctcactgcaacccccacctcccaggttcaagcaattctcctgcctcagcctcccaagtagctgggattacaggtgcctgacaccacacccagctaatttttgtatttttaatagagacagggtttcaccatgttggccaggctggtcttggacccctggcctcagactcccaaagtgctgggattacaggcgaaagccactgtgcccagcctcattacttattctgttgccccaatttttcaagtcttaaccattaggagctccttcaggttggctcctgtgttcattctttcatcaagcccccatccttttttgagcacttccttactcctgccccacaagatgctccagatttgacttatattttcccagtcctagtcctggaatcaactccaaggagtccttaatccttttattaaataatggtttttagaaaccaaaatctgggcacctggtttgctcactgctactaggatgttgttgattctaggccttctcagcaaacggagatagcaaacatgaataacataatccacatatatatacacatatctatatttctgtatctttccatctgtgtatatttaaaaacatgagtttatacagatacttctgtttctgatctaataccacagcattcatttaatcccctttccttatctgtaacttctttctccaacagtaagaaacctggttctcattatctacaatatagtttacttattcatgtataccagtatacacataatatagtttcagaattgctaacacatacttctaactagatgacagcatttatgttcagctctctttatctttagtttagttggttttttgttttgtttttgttttttgtgacaagctctctccctgtcatccaagctggagtgcagtggcacaagcttggctcactgcaacctcctcctcccagcttcaaacaatgctcctgcctcagcctccaaaacagctgggactacaggcacgtgccaccatgcccagctaatttttgtatttttagtagagacggggttcaccctgttagccaggctggtctcaaactcctgaccctcaggcgatccacccaatttaggcaatccacctgcctcagcctcctgaagtgctggcattacaggcatgagccaccacacccagccacatccagctagttttttaatcttttgtagagatggagtctcactttgttgcccaggctggtcttgacctcctgggctaaagtgatcctcctgtcttggcctcccaaagtgctgggattacaggtgtgagccactgcaccaggcccatctagagttttatagagccctgtcaaattactgttttccagagttacttggttttgttcttcacttccttcagtgtggttatattgttcatttgtaatacagtgagggtcatttgttagtgtttgtattccatgttaggtttcctcaacactgtgattgcttttaattttctgtctattgtaggggcatgtgaaacactgctacagttctaagagtcagaggtatacaaaaagatctactttgagaagtgtcatttttgtcctcattctcgcaaccctgacccctttccccctttcgttccatccctttgccactcactttcttttttgttttttttttttggagacggagtctcgctccgtcacccaggctggagcgtggtggcgcaatcttggcttactgcaacctccgcctcctgggttcaagtgattctcctgcctcagcctcccgagtagctgggactacaagcatgagccactatgctcagctaatttttgtatttttagtagagatggggtttcaccatgttggttggccagaatggtctcgatctcttgacctcgtgatccacccgcctcggcctcccaaagtgctgggattacaggcgtgagccaccacaaccggctccgagatatctttaagaatacttcaaggccctgctgaactcagtatgaaaactgcaccaatggacaaagttggacaaaggtatttggtaacaagccttctgaagcctgagattcagccctgttctcatcctagaattatacgtgccattctacaggactagaactacaaacaggggtcaggagaccaactcccaattctggttctgccatgaacatgctttataaccctaggggatctcctaaatttgtggattcaatttctcacctgaaaaatgaagaacttgaactctgtgatcacgaggttcctcccaaagccttccttctgtaggttttgtgtacattaccttagctatagttggaggcgtgccagggctatggagactcacctttacaacatacactctgaccaggagcttgatgggccggttctgtgggatcccccgggagatctggggctcagagaacaacactgcctctgattcagggtaaatgaggaaggagccctgagttggggggagacagaaaaagctctggtaagataattgtcctcctgaatccccacctgggctccctggttccgctttccttccccaaatgtaccttgaacttgcccacaaggtgtccagatccttcctcttctccacctccatcctggcccccttgccctcggtacagaggaaacacattcagccagtcttcaaagtggttaaattcttccttcagggacctgttgtagatctaaaaggcaaggacttcagcaacagcccgatgtccagaatccaaaggagactttcctcttcccagtacccagtcaccttcagggtggcaactgctttttttggggacacagtgcctttgacttcagcctcaccctggtcttggatctccccaaccatagaaatgaggttgaccccatctggaaacagcaaaaatgccccagtcagaaatatctgggtgggtaggggatgggcagatggaaccagagcaaaaagcccaatctgttacctgaatctccaggatcatccatttcatcttcatcaaagttgtgctgaaattaaagagcagatccagagattcttccccatccccttcaaccccttagtctacccccttttccaggagagttgggaaaccttcactcaagttcccactgtgtatgccacttgcatttttaaagctccaatttatcatccagcctgccctgtctagggcagtcaccaccagccacacgtggctactgagcagtcaaaacgtggctagtctgaattgcaatgtgctgtaagtggccaggcttggtggctcatgcctggaatcccaacactttgggagactgaggtgactacttgaggccaggagttcgagatcaggctgaacaacacagtgagaacctgtctctatgaaataaatgctttttaatttttatttatttatttttgagacagactcttgctgtgtagcccaggttggagtgtattggtgtgaacatggctcactgtagcctcaacctccgaggctcaagtgatcctcccacctcaacctcttgagtcgctggggccaccggcgtgtaccaccatgcacagctacttgttttcatttttagtagagatggtgtctcaccatgttccccagactgttctcaaactcctggcttcgagtgatcctcccacctcagactcccaaagtgctgggattaccggcatgaaacaccacacccaggaaaaaaaaagtttgtaattagctgagtgtagtggtatgtacttatggtcctagctactggggaggctgaggtgggaagatcacttgaacccaggagtttgagaccagtctggataacagataaagaccccatctctaaaaataaaaagaaaagaaagaaaaagatgtgcgataagtataaaataaaaaccggatttttaaatacttagtacaaaaaacaagaatgtaaaatatctcagaaattttatgattacttgttgaagttttttttttttttttttttttttttgagagacagagtttcactctgtcacccaggctggagcacagtctcggctcactgtaacctccacctcccaggttcaagcgattctcctgcctcagcctccagaatagctgggattaacaggtgcccagcaccacgcccggctaatttttgtatttttagtagagacggggtttcgccatgttggccaggctggtctcgaactcctgacctcaagtgatctgcctgcctcagcctcccaaagtgctgggattacaggcatgagccactgtgcccagccttgaaatggtattttgaatatattactaaaattaatttcacctgtttcgttttacttttttttttttttttttttttgagagggagtctcgttctgtcgcccaggctggagtgcagtggcgcaatctcggctcactgcaaggtccgcctcccaggttcacaccattctcctgcctcagcctcctgagtaggtgggactacaggcacccgccaccatgccccgctaatattttttgtatttttagtagagacggggtttcaccatgttagccaggatggtctcaatctcctgacctcgtgatccacccgccttggcctcccaaagcgctgggattacaggcgtgagccaccgcgcctggccccttctactttaatgtggctactacaaaagttaaaattacgtatgtggctcgtgttatgtcttttggacaacacagctctagataatggagttaataatccccagcttctagaattgtgaagaaaagaggactataatgaagagctctgaaaaactgtagagctccaccttcaatgagatcattcttgttttttgtttgttttttgagacggagtctcactgtcacccaggctgttgtgcaatggcatgatctcagctcacaggagcctctgcctctgggttcaagtgattctcctgcgtcagcctcctgagtagctgggactacaggtgcgcgccgccatgcctagctaagatatcattctttttaccatttacaccccagccccctccctgggacccttctctgcccccacctgcccctggagctcctgcagcgacgcatagtacttggacccccagtcgagctcctctggatctgggatgtcttcctccagcccagggccttgatttaggaggcctcctagtgggagcttcttcagaggaggctgaggaagagcagactttgtccctctaacccagcaccatcccaagtactgccagccccttcaccatctatctcctctaccccatcaccttcaggagctgtctggatatacccgcttcagccaagaagggatccagggacttctgtcctgggagggggaaaatggcagcatgaggagagtgggtaagtagaagtcagattccacaccccatcggagggccctctggagccacgtccaccaggaatcagaggggcttctgtctggtgtccctgaaggagaaggttcctaaccttgaggtcccttgggcatcatatcccctgtctcctccatctctccttcctcctcaggaggatcctcatgaccccgaaatgtgaatcgcagcatgtgggggacaatgtgggaacccacaaggactgtgtggccaaaggcccggcgctcaatcaccaagatgctgagtggaggctgcaagtaaggctgctccggcaagtcctgggggtggaagagaggagctgtgtctttgaagacctggggaacagggaaaggtagccacagagacaggtaggaaaaaaaatacatctaaacctgcattctaagcccagctctgccatagcctcactgtgtaatctctggtaaaccattgccttctcatcctgtttcctagctaaaaaagggacacaggccgggcgcagtgtctcatgcctgtaatcccagcacttggagaggccaaggtgggcagatcacaagttcaggagttcgagaccagcctggccaacgtagtgaaaccccatatctactaaaaatacaaaaattagctgggcgtggtggtgagcacctgtaatctcagctactcgggagactgaggcaggagaatcgcttgaaaacagaaggtggaggttgcagtgagccaaggtcacaccactgtactgcagtctgggcaacaacagcaaaactccatctcaaaaaaaaaaaaaaaaaaaaagggacacaatcctggattcaaaagactgttgtaaatatcaaatgacataatagaaacataagtactttggagcctacaaagtgctgtcagaagctgggcatggtggctcatgcctgtaaccccagcactttgggaggctgaggcaggcagactgctcaaactcaggagttcgagaccagcctgggcaacatggcaagacaccatctgtaccaaaaatacaaaaaaatagccgggcatagtggtgcgcacctgtggtcccagctactcaggaggttgaggtgggaggatcacttgagcccagggggcggaggttacagtgagccaagatttgcactccagccttggtgacagagcaagagaccctgtctaaaatatatatgtgtatatacacacacacacacacaaatatattttttggctgggcatggtggctgacacctgtaatcccagcactttgggaggccaaggcaggcagatcacttgaggtcaggagtttgagaccagcctggccaagatgatgaaatcctgtctctactaaaaatacaaaaaaattagctgggtgtggtaacgggtggctgtaatcccagctacttgggaagctgaggcagaagaatagcttgaacctgggaggcacaggttgcagtgagccgagatcgcgccactgcagcctaggcagcagagtgagactctgtcttaaaatatatattatggtttattttattttatggttaaaggccatatatatatatatataaaatatatatatataaaatatatataaaatatatatatataaaatatatatataatatatatatataaaatatatatatataatatatatatataaaatatatatatataaaatatatatatatataaaatatatatatatataaaatatatatatggaattccatatctatcaatggatcctaagggaaacaattttactactgtattggtgggtttattttatgtatttgtagatatatacatatatacacatatatatgacaattttagcacaaaagagaggaaaaatagagctataccacagaaaagtttgtatattttactggaattaaattagtattaatctgaagtagactgtgaaacagtagtatgtatattgtaatccctagagcaactactaagtaaaaatcagcaaattaaaatagtacactaataaatatcaaaatataataaatatctatttaacacaaaagaaagcagtaaaagaggaataataagtccacaagacatagaaaacagacagcaaaatggcagatgtaaattcagccaataatatcaacagcatcaaatgtgatcatattaaataccaatcaaaagtcagagattgttaactgcattaaaaaaaagagatgcgactccatgctgtctaagagatactctagattcaaagacacataaaggatgaagtataggaaaaaaatatatcatgcaaatagtaaccacagagagctggagtagttataccaccagagaaaatagactttaatacaaaaaatattactagagacaaacagatactttataatggtaaacaggtcaattcatctagaagatataacaattataaacatatatgcacctaacaacagagcctcaaaatacaaaaactaaaaagttatagaattaaagagagagatacacaattcattagtaatagctggagatttcaataccctattctcaataatggatagacagaaaataatcaaagaggcttgttcaagaggtctgaataacagtaacacctagagagcaccacaagtccatgaattaatccaggaatcagcaaactacagcccatagacagagtctggcctgctgtcagtttttgtaaatattcatttacatattatctatggctgttttcatgctacgatggcagagttgagtagttgcaacagactggatggctctcaaagcctaaaatatttactatttggcccattatagagagtttgctgacccttggatcatctaagataaccaggtagaaagtcaccatccactgccctctttcactattctgccccccttttcccctagcccgtggcctcaccactgtcagatgcctgacaagctcagtgaaattggggctctcacggtagctggccaggacctcagactccacaccttgcccagccacctccagtacaacctggggctgctccacctcgagcagatgcacacgaccaagtcccctaagaccccagaacagcacctggggtcagaaaatgggagattcaggggcctgcaccagacaaatgggcacccggatgttggggaacaagggggctttgagtgcctggtgatacctcaacacggaactccctgagcactgggcacacgttgggtggaagggacaggcgtccagagtggggctcaaccaggggtgccagatcctggggctccacctcactgggcactgagggctgtaggagggaaacagtcagagggcgaagaggaatcaggccaaaggaggaaaagcctaggtgtggggaggggatatggagaggtactggtgaaatgtaaatgcacaggaaccaaccaaggctggattggtggaagggagggggtctcgggaagcagcttcgtgcaggaagggagcagggtgtctgaggcatgcaggatggcccaacaaggtgaacctagcacatgaatacttgcaatgttccttggggtcaagtggtccaatgaggtgacctcaggacaaacctgcagtctttattctctggggaaaagagacctggaggctggtcctgggacatatccatgttttatattccctagggctggatggcctgatggactaacaagttgggctcacagcctgtgctagccacgccagggcatgctgacctcaagtcggccactgtagtctagttcaatgagttgaaaggcggcaatgagctctccggctgcccagggtcccttcctcagggggaagaactgcaactctgggcgttggtatgggtcctccatcagctttacccttggggcggccagtgccctgcccaggaacacgggggggccctagggggagcagggcagtgaagacaaaggggaagaggctcaggagccagggaaggtgggcatcaagggggaaactcctggccaggaacccagggagggcccaggccacactcacaaacttattgtggtcaaatacattgatgatcactaatggaggctcctcctgcaggtgctccctcctcccatccacgatcaactgctcaaataccaggagttcatcccacagagggctcagcgtctgctccaggaccttgggggccatacagagaagcgggtagcagcagatatcaggagaaggctcccaacatgcatgccatgcgaacacccctgctctgaaggaatactttaagtaaatgctcatcacaagaagagtgagatgtgaggaagacgaaagcatcttcagttggtgttgcagccagcccctcacagccctgcctccccattgcaattggcccctcagagtccaggcctaaagtcaaccccagaaaatgactcctcgccgctaagacctccagttctacatcacctgctaagttagggccatctagtaccccatcctgataccctgctctgcaaacccagagtgcgaggagaggggccttggggaaaagctcagacccaccctaacttgtctcctgggtcccttccacccacatgtcatcccagccctcacccgtgtggtctgacactgggtagagatgaggactcgagcaaaggggtccgagaggccactgtcatctgcagccaacacaccccgggcctggtacaagtgagcccggagttggaagtagctaaagtctggggtgaggggcaaggaaggtgtcatgtttgcccaggggaaccactgaagtcccctgactgagccccacaccttgggcagagagccaggtgggccttatacctgccctgcccaccctctgcactcaccgtcccggtgtaggctggagggcagcccggctgagggctcgggcagcaaatccgggggcagctcagaggtgcaggccttggcttgcttgcccaggcccagccgcaggaagagctccagcttggcacagacctcaccaggggctgccccgggtgcctgtgtgtgaagaaggcatgtcagggccccgatgcctcttctcatgaccccagctagacctagcaatcctgcttccccagggcacacctctactgcacatcgccacaccatgccaaactcccagtccactccctacctgcccagccttaccctcttcctaccctccaccctacgccatgaccctcacactcttactccctatacctcttgccctaacactgccacttcccgtaccccactccccagacccctaactacactctgagctctgctctcccacctttgtcccctccaccccctacacgtttacattccccatccccaaccccaagggtcacggcttctccctcctagggacccttttcagttatcttttccagggacacctcatttagaaatctttggcccacaaaccagctacacttttttttttttttttttttttttttaagatggagtctccctctgttgccagtctggagtgcagtggcgtgatctctgctcactgcaaactctacctcctgtgttcaagagattctcctgcctcagcctccctagtcgctggaattacaggtatacaccaccacacctggctaatttttgtatttttagtagagacggggtttcaccatgttggccaggctgctctccaactcctgacctcaggtgatccgcgtgcctcagcctccccaagtgctgggattacaggcatgagccaccactcccggccagaccagccacacttgtaaggggtgagtcacactctctcgtttttggtaccctgcctatctgtcagggcctagtcagcaaaatggcccatgcagtcccagagctagggaagatttggggtttatctgatttcaaagctgccccaggcaaaggcacaatccctttctggtgttttggacaattggaaagtgttcaggggcccctagctgggaagcacaggcctctacccaaggcctatcctacccttgccctataagctccactccacttctcccggcccctcacccgtgggtcccctcaccgtgagcattagactctggatcttcccacagtctcggccccgttcctcctcaaccacagagaacagcacatcctgggcagggatccgggcccaggccacacggcgctgcccgctgagcatccagaccagcacatcggggaggggtggctggggctgcgggtggataactggtcacggaggtggatctggagccgacctctcctgctctcacagcttgaactgaacggaccaaatagccactccagcttctatctccccgagacagggtctcactctgtcgcccaggcatgagtgcagtgacactatcatggctcactgcagcttgaccacccaggttcaagcattcctcccacctcagcctctcaaggagctaggactacaggcacgtgtcaccatgcctggctaattttttactttttgtagagatggggtttggccacgttgcgcaggctggtctcgaactcctgggcttaagagatcctcctgccttggcctcccaaagtgctgggatcacaggcatgagctaccacacttggcttcttttttttaattgtggaaaaatacttataaaattgaccatcatcctaaccatttttaaatgtacggttcaggggcatgaaatatattcacaatgccaggcacggtggctcacgcctgtaatcccagcacttttggaggctgaggtgggcggatcatgaggtcaggagatcgagaccatcctggctaacatggtgaaaccccctctctactaaaaatacaaaaaattagcctggcgtggtggcggacgcctgtagtcccagctacttgggaggctgaggcaggagaatggcatgacccgggaggcggagcttgcagtgagccgagatcgctccactgcactccagactgggtgacagagaaagactccgtctcaaaaaaaaaaaaaggaaagaaaaaaaaaagaaatatattcacgttattatgcaaccatccccatcattcatccccagaacatttttcatcttgcagaacagaaactctgctcattaaaccatacctctccattcactgctctccatcccagcccctggcagccaccattcttctttctgtgtttggatttgactacaacaagccctccatatgagtggaatcatatagtgcgtgcccttgtgcctggcccagttcactaggcataatgtcctcaaggctcatgcacgtggtagctggtgccaaccttgtctcttcacctttccctcctccccagtcttatcttccccaatgtgcacagtgtgcacatgtggtgcccatcacatcagccaaatacctgggctggtgacactcttctccaacatccaatcacccattcctggcagtttcccccttctctccctttctccctgccccacttcaagaccatctgctttttttttctgttgccgaggctggaatgcagtggcacaatcatagcttactgcaggctcaacatcctgggcccaagtgatcctcccacctcagcctcctgagtctctggggactataggcacacaccaccatgccttgcgatgttttcatttttaaatttttttgtagagatagggtctcactatgttgtccaggctggtctcaaactactggacttaagcaatcctcccacctcagcctcccaaagtggtgggattacaggtgcgagccaccatgcccagccaaaagaccacccactcttggctagacaattgtgacaggctcctaagcagtcttcctgccttgagtcctcccttcctacccactctgccatggctggctggcttctccccatcctctgggtgtcagctgcaatgttgtctttgcagataagacttgcctgaccaccttacccaagcaggttctcctccaccccctcagcctctgtaacctctttcttaccaattcctatagatcataattatttttcatattcatttacagatgtatagtctgtcttcctaggacattagcctcaaaagggcaaggaatatggcaggggctgacccccagggcctaatacagagcctggcacacaggaggacttgaaatatcattgagaggccaggcgtggtggctgaggctgggcatagtggctcatgcctgtaatctcagcactttgggaggctgaggcgggtggatcacctgagatcaggagtttgagaccagcctggccaacatggtgaaccccatctttactaaaaatacagaagagtaggcaggcaaggtggcacgcgcctgtaatcccagctacttgggaggctgaggcaggggaatcacttgaactcaggaggcgaaagttgtagtgagttgagatcacaccattgcattccagcccaggcagcaagggcaaaactccatctcaaaacaaaaaaaaacaaaaaaaaaaccaagaatattcatagcagctttattcatactagctaaaaacatgaaacagcacagctgtccatcaatatgagaatgaataaacaaactgtgatatatttatacaatgggaaattgctcaacaataaaaagaaagaaactagatatctgcaacaacttggacgcatcttacaacagcctctcacaagagaatacagtccttcctcattatttgtgaattctgtatttgcaaatttgcgtactagctaaaatttgtaacccccaaatcaatacccctggtgcttttgtaatcacatgagtatgggcaaagagtcaaaaactttgaacaggtcaggcatggtggctcgtacctgtaaccccagcactttgggaggccaaggtgggaggatcacttgagcttaggggtccaagagcagcctgggcgacaaagtgagacctcatctttattaaaaaaaaaaaaattaaaaaaaattttttttgagactaagtctcgctctgtcacccaggctggagtgcaatggtgcaatctcggctcactgcaacctctgcctcctaggttcaagcaattctcctgcctcagcctcctgagtagctgggactataggcatgtgccactatgcccaactaatttttgtatttttagtagagatggggtttcaccatgctggccaggctggtctcaaactcctcacctcgggtgatcctcctgcctcagcctcccaaagtgctgggattacaggcatgagctaccgcacccatcctctactaaaaatttttaacccttctttggttgaagccgcagaaacaagatgacaaaggaaacgtcatcgtttggaaagcatcgcgataagacacacactttgtgccgccactgtggctctatggcctgccaacttcagaagtcgacctgtggcaaacgtggctaccccgccaagcactagaggaagtataactggctaaaagacaaaataccactgggactgatcgaatgaggcacctaaaaattgtatactgcagattcaggcatggattctgtgaaggaacaacacctaaacccaagagggtacctgttgcagcatccagttcatcttaagaatttcaacaattggccgggtgcggtggctcatgcctgtaatcctagcactttaggagcccgaggtgagtggatcacgaggtcaggagttcgagaatagcttgatcaacatggtaaaaccccgtctctactaaaaatacaaaaataagccgggcgtggtggcgctcgcctgtaatcccagctactcaggtggctgaggcaggagaatcacttgaacctgggaggcggaggttagagtgagccgagatcgagccactacactccagcctgggcgacagagcaagactctgtctcaaaaaaaaaaaaaaagaaaagaaaaaaaaaaaattcaacgagtcatgcaaaaagtgttctggtttattaaaatacaaaaagaaattttttaacctatttcctgtttgccttgagaatactcttgcctgtaatcctaatgtaacatcatatatacttctgttacattaggattagagacaagttctgtttagaaataactccaagtaaggtttttatattttattttcatattgaaaatcagtcataatttcttcagcctcaaagaatgagtttatgtaaaattaaatgagtgctggcagtgagctgcactttttttctctaaacgggaaatgggtttaaattttttttttttttttttttttttttttttttttttttttgagatggaatcttgcagtcacccaggctggaggaatgcagcggcacaatctcagctcactgaaacctccatctcctgcattcaagcaattctctggcttcggcttcctgagtagctgggattacagatgcataccaccacacacacccagctttttgtgtttttaatagagagggggtttcaccttgttggccaggctggtcttgaattcctgacctcaagtgacccgcctgcctcggcctcccaaagtgctgggattacaggcgtgagccaccacacttgagacttagatttaaaaaaaaagtttgaagggccctgagttggaataaagcaatactctgcctttgtgagctctgatactgtaagcattttgtttttgtttttgttttttgagacagagtctcattctgtcacccaggctgaagtgcagtggcacaatctcagctcactgcaacctctgccttctgggttcaagtgattctcctgcctcagcttccagagaagctgggactgcaggcactggccaccacacctggctaattttttatatttttagtagagatggggtttcgccgtgctggccagcctggtctcaaactcctgacctcaggtgattccacccacctcggcctcccaaagtgctgggattacaggcgtgagccactgcaatggccaacaatatattatattaaagaaagtatctttaaacaaacacacataaaacaaggttttgtactgatcagttgacaaaaaaaatgtgaccatcgcccactagaaacctaaccctgtatttctctgggggcagtgattcagtatttgctaattcagtgtttgcagcaactttatagaccaccaataacaagaactgactatacatatggcatgattgcattgtattaaaatctagtacaggcaaaactataatgaaaaaaatcaaaatatattgaaaaaatcagtagttatctctatgggggtggatggagactgactgggaaggaacataaaggaacaactctggggtgaaagtcatattctagatcttgatagggacttgggttacacagatatatgtatttgccaaaattcagcaaatgtgtgttaagatttgtacacttggccagacatggtgactcatgcctgtaatcccagcactttgggaggccgaggtggccagatcgcttgagtccaggagttcaagactagcctggccaacatggcgcaaccccatctctactaaaaatacaaaaattagcaggcatggtggcgcatgcctatactcccagctactcaggaggctgaggcagaagaatcacttgagcctggaggcagaagttgcagtgagctgagatcttgccactgcactccagcctaagtgacagagtgagactctgtcttaaaaatatatatgtatttgtacacttcattatatgtaaattgtacatcagaggaaaacactgtaatttttttttttaaatcagtggagggccgggcgtggtggctctcgcttgtaagcccagcactttgggaggccaaggcaggtagatcacgaggtcaggagttcgagacaagcctggccaacaaaatgaaaccccgtctttactgaaaccccgtctttactaaaatacttaaattatctgggcatggtggcaggcacctgtaatcccagctactcaggaagctgaggcaggagaatctcttgaacccaggaggcagaggttgcagtgagccgagattgcgccactgcactccagcctgggcgacagagctagactctatctcaaaaaaataaaaaataataaaaaaataaaaatcagtggaggggtccactattagtttggatgtagaaagactcactcccggcctggcacagtggctcacatctgtaatcccagcactttgggaggccgaggtgggcagatcacctgaggtcaggagtttgagaccaacctgaccaacatggtgaaactccatctctactaaaaatacaaaaattaaccaggtatggtggcacatgcccgtaatcccagctactagtgaaactgaggcaggagaatcgcttgaacctgggaggcagtgagccaagattgcgccaccacactccagcctgggcgacagagccagactgtgtctcaacaacaacaaaaagacttataccctaacaaccaaaataatccaaataaattgtaaaattatacacacccacaattatttttttggatataggatctcgctttcacccaggctggagtgcagtggcacaattatggcttactgtagcctcgaaccctgaggcccaagcagtcctcccgcctcagcctcccaagtagttgggactacaggagcttgccaccacgcctcgttagttttattttttgtacagatgggggtctccctatgttgcccagactaaaaatcgtattttaaaaaacacatcagagaagtggggattcaaagaaacctatatcaactaaactccagaaaatgatgagttcttcataatcaaggagagacctccagctgctactcccacctctggcagaacagcagtagtaaaaaggaacatcagaagtggggacaaggagaaagtatccacttttaagagacttttaatgactatgtgtgaggtagcataccagatgagaatcccagggaccacagccacaaaatatgtctttccgtacctccgaactctttcctatggatcctcgcctagagctaaggggcggtatgcaaaaagctgggaacagggaaggagagctgagatctttctgaggtatgtaaagtttcttgaaagtgcagagtaggccgggcactgtggctgacacttctaatcccagcactttgggaggccgaggcaggtggatctcttgagatcaagagttcgagaccagcctgacgaacatggtgaaactccatctctagtaaaaaaaaaaaaaaaaaaaaatacaaaattagccaggcatagtggcacatgcctgtaatcccagctacttgggaggctgaggcaggagaattgcttgaacccaggaagtggagattgcagtgagctgagatcatgccattccactccagcctgggcaacaagaacaaaactctgtctcaaaaaaaaaaaaaaaaaaaaaaagcacaaagtaactgcccttagaaggaggtggtagggaagagaatttaaaaacccagaagtggtcctctgggatttcatcttttgaaggctgagggttaggtaggagggctgagagaaacctcccccactaggctttcagctatcagatgctacaggctcagctggagagccaagagaacccttctgatgcattctagacttttacaacgtaaagtggagaccctccaaaggccagaggagggaaagcaggactaacaaggcacagaggaaaggaagcagactcaaaaagcacagagaatgccccagcaacccaaacacctggttggtggtttgtaaagcagggagagcttacccagagttggagaattggcagtttgggtgtgaacaagaaacagatttctggaatcttgccagttctcagttctaagcctggatgaaaggacaatcgtgatccttcaaaaaaacatttgaagcccaaagtgaactgaaccaaaccaaattcacaactaagcccatttcaaatacaaagcataatgacttggtcctcactctctagagtaaggcctagtgtaagaagagaaatgccatttcctggacatatatattattttagtcactaatgttttatacaaatatccaggcatatgataaaaaaaattacaggacggagttaaagcaaaactcatggtcaagaggaaataatcaatagaagtagatgcatagataacccagatgttggaattattagataagcatattaaaataactgtgatagaaatctaaatgatctagtgaggaaagtacacaagaattaaaagatgggtgatttcagcaaacagttgaaaactggaaccaaaaggaaataatagaaattttaaatatatcaggcaaacagttctacaatagttggagtcttcagtacaccacttacaatagcagatggaacatctatacagaatattattaaggaaatagacttaaaacaacactaaccaactatacctagaagacacatacaaaatactccatcataacagcagagtacacattcttctcaagcactcacggaacattcttcaggatacatcatatgttagatcacaaaacagtaaatttaaaaagactaggctggccgggcatggtggcttacacctgtaatcaggcagagattgcagtgagccaagattgtgccactgcactccagcctggtgacagagagagactgcgtctcaaaaaaataaaaaaaataaaataaaaaataaaaaaagacacaaatacctaaaatcagaaatgaaaggaaggacattactagcaaccttatggaaataaaaagattgtaagagaataccatgaacaagtataaaataacaaattggattatctaagatgaagttataaaattcctggaaatacaaattatctaaactgactcaagaagaaatagaaaatctgaacaaatctataacaattaaagagattgactcagcagtcaaaaacttcccaaaaaaagtcaagaccagatgccttcactggtgaattctaccaaacacttgaagaagaattaacgccaatccttttcaaactcttccaaaaaatagaagagggaggaacacttcgtaactcattctatgaggccagctttaccttgatatcaaagatagataaatcacaagaaaagacatcaaatcattacatgccgggcgtggtgacttaggcctgtaatcccagcgttttgggaggccgaggcatggaggatcccttgagccccaggagttcacgaccagcctgggtaacacaggaagaccccatctctactttttaagtactttttttttaaatcaaaaaagaaaaaagaaaattacaaaacaatatcccttataaatacacagatgcaaaagtcctgaagaaaatccaatgacgtatttaaaaaatggatatacaccattgataaaaggaattcatctcatgaatgcaaggatagtacaacctaaggaaatcaatcagtgtaatacatcacagtaacagaacaaaaaagaaaaaaacatgatcatcttaatagacacagaaaaaaagttcgataaaatctaacaccctttcacaataaaaacgcaaaactaggaatggaagagaacttcctcaacctgataaagggcatttatgaaaaacactgctaacatcaaacttaataaataatgaaagctttccccctagaatcagaaacaaagcaagtgaaaattacaactttggctagttgtggtggctcacacctgtaatcccagcactttgggatgctgaggcaggagaatcacttgaacccaggaggcagaataaaattacaatttcagaaaaagtatgtgtcttgtatctgccattgtgagcttgacagcttgccaacactcgaagatttttgtgactggacatggcagctcacacctgtaatcccaacactttggaaggccaaggcaggaggactgcttgagctcaggagtttgagaccagcctggtcaacacagcaagaccccatctccatttttttttttttttttttttttgagatagagtctctgtcacccaggctggagtgcagtggtgtaatctgagacctgtcccgagaccaaaaagtttgagaaccactgccatagaaaagcaccaggacatgtaccaaaatggtctcggaagcattgtttctaatcacaacccattgggaacatctcacatacccatcagcagcacaatatgttatatatatatatatatatatatatatatatatgtatgtatatatttagtgcttcagacaagggaggtcatgctcaaggcagcctactctcaaatcttcatccaaagaaatcctgaatgttccctgggtctctgctggattctagaactcttgtcctcacccttagctactgcaaatgaatcttggtcctatgcccacagcaattagtcccagccctggcatcattccaaaggaaaaatgttaaatcacacctgcccgaggcctctggaatggttcaaaagcttagggaaaagggtgtacagggtaggaaagtggggtgagtgaggcattacctcctcagccagaaagcgcagttttgccaggagcttcttggccagtgccaccttcttttgcacattgcgccgtctcaggccgcgtagaagtcgcagtccttgcttagccaaaaggttctgggagggcaaaaagacagcatgagcggaaggccccagctaggcgcccctgagtcccttcccgaggccgtaccaggctgtgcaccaggagtttccctcggcatcgatccagggcattgggccgggtcatcgtcctgcgctcggcaccgtggcaaaactgtctgcagtgagcagggatgtgcacagcagacaggaatcaaaggaaaggagaaggacagtgaccttggggccacttgctctgagctgacctcccacccccagcctccctcatagccctctcagtcttgggctctgaagaggcaccctttctcctgcaaagctggcctatctctatttggaccactcccaaaaatcattaaggccagccttgctcttgagctccagagctcgctaatacttaaccacctactaccctggctaccccaggtgtggcccatggaccaacagcactggtatcacctgcaggctatttaaaactgtaggacctcagccccaccccaggccctgctgaatcagaagctgcgtttatgccctcggggattcctaagcacattgaagcctcagacgtctccaccagcttggctaacgtatagcttgaacattacatgcccaagccaaatgcatactttccaatgatcccccccgcaaaacaaaacaaaacaaaacaaaaaccctatttcacctcagaactttcgagtcatctctcactgctctttctctcttattccacatcaattcatcagcaaattctttatgctctaccttcaaaaaatatccagaatctggccaggtgtggtggctcaggcctgtaatccccgcactttgggaggccgaggcggtgaatcacttgaggtcaggagttcgagaccagcctggccaaaatggtgaaacaactgtgtctactgacgctgaaaggttgagcatggtgagaacagaaaagtgaccacctacagcctcctacctcactgcctctcctgatcagggtccttggctgagtccctgcttcctccctgcctctaaatgctggaacgctccaggttctcagatttctcttttctgtgctctgttaatgctgttatccagctccatctacataatgatagttcccaaattgacatttccagcctagaattctccccagaactcaactcatatagctaactgcctaccacacatgtccacttacaattcaataagaatttcacagttaacatgtccaaaactgagctcctactatctgccttccctcagatcccacctcatccctgcttccatcagaccttctcctttgttttctgttgaaaacagatttttttcttttttccaaaaaaagaagattttggcttgcataactatgcagttggtgcagccttaaactcctggactcaagccatcctcccatctcagcctcctgagtagctgggactacaggtgtgcaccaccacacccagctaacttttgtatttttcatagagacaaggtcttcctatattgttcaggttggtttcaaacccctgggctcaattgatcctcccaccttggcctcccaaagtgctgggattccaggtgtgagccaccatgcccagcccacaagccaaaatcttagcaagtcctgaggtatcacccccaattccaaattttctctggaatccattcacagcactccatctccactgcaaccatcccctagatcagttcatcgccacctgtcacgtggattatcacaatagcccctttactaatctccctgcttcctcccccactgatcccttttaaggatctatgtgttagagtgtatctttttccttttcaaaacattcactgcccctccccccccatttcactcagagaagaagccaaagtcattaaaatggcttgtgaggctcccacaggatctgtccctccccaccatcatcctccttcccctggcctcctccagcctcttctactatgtcacactgctgcagtcacactggttctgtgctcctcctcaaacactccaggcatgctgtcccctccacctggaacaccattacaggcaggctttctcctccagcttcatgtcaccttcacggtggcctcccctccacaccctttctgaaattgcagtacctctttctaatgcttccttgcttcgcgttctttcttaacacttatcctacttagtatttttctatctgtttacatgcttatttcacatgtctccacccttccccaacctctacacccaaatgtaagcttcagggtttttttttaaagtcagggtcccattctgtcacccagactggagtgcagtggcgcaatcatggttcactgcagccttgaactcctgggctcaagatcttcccacttcagcctcccacaagtagctgggactacaggcatcagccattgtgcctggccaacttcagggatttttgtgggcaggaatgctttttcactgatattcctgtgcctaaaacagtgtctggcatagtaagtgccataaatagttatcaaataaagaacccttttgagaagaggatctgaaaatcacttaagtacctggagcaggtaatggaattcagggcagtagtgaaggtcaaagatggaagtaactagaacatgttttttttttgttttcttgtttgtttgtttttgagacgtagtcttgctcagtcacccaggctggagtgcagtggcgcaatcttggctcactgcaacctccacctgccaggttcaagtgactctcctgcctcagcctcccaagtagctgggaggtacccaccattatgcccggctaatttttgtatttttttggtagagactgggtttcgccatgttggccagtctggtcttgaactcctgacctcaaatgatctgcccgcctcagactccaaaagtgctgggattacgggtgtgagccaccgcacctggccgaacatgtttatgtggttacagcaatgacctggtaactagggaccaatcaatgatgaaggggagaaaattgacaattacagaactaattcctccagtgatgaaatccagatcacagctgtggtcactggagcaggaaaggaggagagcagatggatgcagaagccggcaaggaggtagactgggtgtgggaaggtgattagcaggaacaagtgtgaaagaaaggaggcgaggtttgaagagacacgggataagcctctaggagcgtgggaaagggaactcatggagatggaaaacagctgaggtgccagagaatcaggggaagcctaacccccaataatctcatcagctccctggataggaataattgtcttctcatttttctgtaaggtgctgagcaaatgcagctgcaagctgcccttgggtccagacagccaccgagagtctcccttgccctggagttggcccaagtacaggcagcagtaggagtggctctcagctcacctgctcccagccaccagtacttccagtgcctgcttgagctgtgcacaggcgccaggccccggcttgcgctgcagtctctcaacctcctgcagcccctggtcctgtgcaacgtgggagagggtcagagtcttgagggtccctgactcagacctcttgtagaccacacccccacccaaggccccacccactcacgaccacacctcttggcctgcccttctttggctccatcaggttgatggctccatctttctagcccgctactggctccaccaaatgtgcggccccaccatccgtacctctacccatctccttcatccagtcccttcctgggtccaccaattctgaaactctgtcctcccacaactcctggcatcctcggttcgcccagaagctgtgctctttggcccttgcccccctggccttgcaccagcaaggtgctggctctctagtgcctgcccattagccccactgcagagcttccttcaaaggctgcagtgtcctaggcgtccctacggcccggtctctccctgtgggcgccagccttgcccttaccagcctctcggccactttgcgcacgcagttgctgctctgcaggcgccaggtgtggtcctcccagcaactccacacatgcatgcatggcttgcagtgacagaggggcaagcagaagtatggcctggcagatggagaggaggcttcgcgggcattctgggttcctggagacctcccaaacccccccttccagccaccggcagcactcacccactgccgtccatgggctcaggccgctgagcatgggtccccagttcttcctcctctttctcctcctctggcctggctcccagcagaggctgagcctccacggctgcaccctcagttccctccccagccctggaccctcggcccaattgctcctccagacggcctgcgcgacctgccccagagcagcaagggtcagtgggcgccaggctgagggctggaaccccccctcaaccacctctgcctcaacagaagtcagaacctgccccttactgaaagtcaacaccccttccagggttctaaggtctgaaatggcactcaggggttcggctaggccacacaccaatggagatctcgaagctgatgggctgggaggccacggtggggtcgatcatggtggcctcgaagagcacaccgaaaagcaggaaatcttcacagggcgccaggacattctgggggaggccatcaggctggagtcagcacctactctcccagggaacagcctggactatgcttggccgcattgcccacagaaagaagtgcgaccaaggcttggaagtcactgcaggtttcttactccctctccctcctcccggccccagcattggccctgggtatgggtcctctctcccacaacatgtgtgcatataccagagcccatgtgggcacacacctcactcttcgcccaggcccccaaattgagacccctgtcgtggtgtttaatgcctgagagtggattccaccttccagagctgaggtgaccccgccccctttgctaccccccagcccccacctctggcagcggcagcagctcctccacctccacctccatggcacgggggatctcaggcccctcggcaccggggctggcgtccaagtgctgcggaaccgcctttggggtctgatcccttctggctttctttttcttctttcgggtgagccgggacaacgtggacccctgctgggcctggggaggctcaggttcagctctcccttccaacacctgcatggacacagccagcagaaggcggccgcggaaccaaatgccttggccaacgccttcgttgagaccttgaagactatcccggagccccgcgccggggggcgagccatagaggggcacccaggccgggccgaaggtagggttaaaccccgctgtggggaacaagagaagcgtgttggaggggagcgtggggagggcgagtgctggtaaatctctgcacctcaccctgatctcctccaagtattcgggggtgagggcaggggaggggggctaagccgctctgaaacggaagaagttggccagcagctgcggacgcgccgctgtggaacacgacctggggcgcctccaaaacagctcagcgccccaaggagctggaaatcgcgggagcccggcctcgggggacgcagcctgagccctgggggcggggtcgggattggggcggagctacgggcgatcggccaggcctgggggtcggggaaaggagtggaccggcagtgtcagcgtgtgcacagctgtagaagggtgggactgggctggttactggacaggcggttgtggtcagaattttgccaacggagccaaaccgatggtggggttcacagtctgggggcggcttgaagcagtttgttttgcgggcggaccagccctcctaggcggagcggggtcgcgaggatggggcttgcggttgggaatgggccctatggagccctatggaccgaggcgagtgaggccagatttgccgcggccagaagcgctcacccgcgcggcccggatgggagatccgcctcaggtccggcacgtgcgtagcgagtgccgcgtcgaccaggggcgcgtcgtcccgcagctgcaggcggaggctgcgcgtcagcggcgggaagagctccacgaagctcagctgctcgttccattcgggcgccgccgcctcggcgctcaccgacgtctcgccctgaaggtggcgttaaagacaggagaagggagatcagcgcggagtcggggccggagccgcggcgccgtgggccccggagggacttacctcctgccccaggaaagacacccgcacatagggctccaccaggacgcgctggtcgtgcagggcgcggaccaggctgcccagcagccccaggcgcagcgcgggaagcccctcggcgcggtacaggcgcacgcggagccgcgcccatggcctctcggcgggcaccccgcgcggcaggagcaggttcctaggggagggggcaccgagcggggggggagaaactgggatctcggcccctccccttatccgcgccccacggccacccccggatccatgtcctcctccccacctcaccccggctcacttctcgatgtccgaacagtgccctggggccgggggtagcattggagggggcaggtccccgcgcgccctcacggacaaggtgaccttaatgaaacccttggtcccggcgcgggtgtctcggggatcatgcagcggaacccatctttggtagaactggccatctaagggcgaaggggcgagccaggggtaaggggcgaccggcgggacgcacagggtggccgtgaggctatcggagtgacggacaatggccagggcttctctggctcagcagggaggggcggaagtgccaagagttcagcctccgccagagatggccctctccgaagtgagtgtataggggtccatgcggagtcactgcagggtcaatctctagggcccttgtccgtgcagagtctcaataaggggacgattccatacctggctggtccaagatgatgcccaggtccatcctgaaggtgcctatccgggtggccataaaggggagggtctgcgaatggaaagccttgggggaaggtggtgttagtcctgcagctttctcatccccccttctctgaaggacactggtcacccctaccccactcaccgtgatctccagcagcaagtcttggagacgaagccgcgtgtcatgaaattcgaacaagaagtactgaattgaagtggggatgagaggtcagatgtgaagggctcctgccagcttacccaggtctcttgctcagaagaccctccttcccccacccccaaccctctcactgcaagcttttcctggatcagcaaccccccaaccccaacccataggcccagcatctggctccatttccacctaggcctcacccgctccgggaatagttctcacatcaacccctcccattctgtcaggctcgccctcttctgtggtggcacccacctcattgtagaaggggcaactggtcccacgctgtgtggcggtcacacggcgctgcccccccacttgcacggccacataggggttaatgttgactcccaccagtttctgggcttccagcacagtgactcccacctgagaggtacagaaggatgaggaaaggaagccagacctgcctgggtggagggaaagaacatgcgtgccagaagaggtagtacttccaagggttaggccctggaaaaagagtagtacctggaagtcttgagctctggacacctggaagggatccccatgggccagggccctggcgcggctggagagaagcttaaggttagcactcacttggtccctcccctgcacacgcacacgcgcgcacacacacacacacacttgcttggtgctgggaatgatgttttctctccctctgaatttttggattccaggtccttcaggtcatgtcttgctgcctccatctcaaccctgcacccacaatttgactcattcctggagcccgaaaccattcattcatgcaacagaggtttattgagtacctactatgagctaacactgtcccaagcactgggacgctgtagtgaagagacaaatcttgccctcatcaagctttcatcccctgcatgtgtgtgagccactgtaactatgtgtatgaacatggcagtgtctatgcctatgagcaagtgactggagaatccacccttcccacaccccctgggactgtgtgtttgtgagggcagatgggtgtgggagcaggtgtgccgtgggtacaagttacctcttgagggggctgaacataacaccagaaagttccacgtcaggctcatcatccaggtcctgctccagctcaagctccagctcattctcttcatcgtcctgctggcctagacttcgagctagcctgcggcctagagccactgcccgccgctccagctgggcctccccaggcctgataggaaagaccctcaagggacatgcctggaacccatcacccatctccaggcaatcccttgacttcctggagccttggactgacccctgacccttgaactgatcccactgatcctaggaccagttattgaccttgtggctgacttcactgatcccaggacagactcttaaccctgggacatttctaattccagaactgacctctgattctaggactgacctctgaccctggaactgattcagttctgacccaagaccctggggctgcccccatatcactggctcctaactccaagactgactcagtgactccaggtcatccccacatacttactccagttcctggaagcccacattggggatgattaactcgaagctggggaataataaatgaaaggactaagaggaacattcctaactacagagcggcacctgctcagcacacgtccaagggtcactgaatcggcagatccagagtggaaccgggcactacttctccctttccagggtctgcctgggctgggaccaccaggtcttgcttcagttgctgaggggattacctgtcctggatgggtgccccaaagtcctcctctgaccaggctccagtagcgccctctgggggctggtacttcaggtcaagctccacctggatctgaaaccagatacagtatcccctagggccccccatctaactgccctgggtctaagagaggcccaaggacaatgccagtgccttttactacaggcggcagagatctttctggccagcatccgtggtgccttgtggttcctctctgatcattaataatgtagactactcataacctattaagaactaagtaactaggcaagtttcctcgttatttttttctttctttttttttttttttttttttttttttttagtattgatgaggtcttattatgtaccttgcccaggttggtcttgagctcctgagctcaaatgatccttctgctttagcttcccaaagtgctgggattacaggcatgagccattgtgcccagccgcaagttacctcttgaggcccaacaggattccaaaattgtctcatttttgttggaaatcccttacggtggccttcactactctgcctggtctggccccaccaacctttccagctccatctcactccaggcaccccagctgtgctccttcaaggcgctggacttttgcatatgccttttcctctgcctggaacattctctcctcccagttaacatctgttatccttcaagtctaagttcaggtactatttcctcagggaaccttctctggcccccaagtagatcatactcccctgtggtaccctctcccagcccctaccagctttcttctaacacctgccagttccagtttcacacttacttgtgtgaatatttgtttaatgtttgcctcccttccaagggtgtgaatctttatctggttttgctcaccacggaatcctcattgctcagctcagcatttggcttatcataagagctcaacaaatgatgacggactgaacaaaagaactccacattatataaatgagaaaatagcttccaggccaggtgcggtggctcatgcctgtaatcccagcactttgggaggccgagggtagatcacaaggttaggagttcgagaccaacctggccaagatggtgaaacccagtttctcctgaaaataaaaaaattagctgggtgtggtggcgggcgcctgtagtcccagctacttgggaggctgaggcaggagaatcacttaaacctgggaggtggaggttgcactgagccgagattgagccactgcattccagcctgggtgacagagcaagattccgtctcaaaacaacaacaaaaaaagaaaacagctaccaaatgctaaagaacgtgtacaagttcccagacgggaaatggcagatctgagatttgaagttaggtccatgtctactaggctatgagcccttccatgaaacaccaggaaaatccagccaggttcatctttgtctcccaaaagaattgattgctgaaaggaatcctggctggaggccttgttaccactcctctctgggtcttaggttttcccctgtgagaaatggaaccctttatctagaggtacttaagggtggcagcctgggggccagaggggctcaccggggacacttgaagattctcatccactagggcttcccgtagcaccaaatgcccagcattctgtagctgctgcagggagatcaccagggtccctagaggcctaggggagtggcatagagcaaaagagtgacccaagagaatggctctaagtcacccccagcccaacctgcatccctgtctccccaggcctactcacctaaggctgaatacacggctgcagttgaccacctgcacagacagacactccccagccagtggagccccatagtggggccatcggaacagctggggacaggaggaagcttgtgacacccatgctgtgctgaccctaaactccaatccaaagcccattcttggctgggcacagtggctcacgcctgtaatcccagcaccttgggaggccaaggcaggcagatcacttgagatcaggagttcaagaccagcctgaccaacatggtaaaaccccttctctactaaaaatacaaaaattagccaggtgtggtggtacatgtctgtaatcccagctactcaggaggctgaggcaggagactcgcttgaacttgggaggtgaagtttccagtgagctgagattgtgccattgcactccagcctgagtgacagagtgaggccctgtctcaaaaaaaaaagaaaaaaaaagaaaaaaaaaaaccctattcctaaccctcagacaggagccaatcctccagacttagagctaactttaggactaacatccccaaacctggaagggatccctgcacatgggtttgaatctgagtgagggctgatctgggactaactagtgatcaagaatgaattcccccagtcttgcaactaatttgttccaatctgggtctgatctctcaggcctcagactgaccccacctcccaagactatacttccccaaacccaggaatgagcccctgaaccccaggttggacttggatgggagacagatcaggaaccaactgtactgacctcaccgatatctgcttctggaccacagtgaatttttcttgttttctgggtaaagcctgctcagaactgaaactagtcatatatcagcccctccccccacacacacaaaaataatttgcttcccccactcttggcccagtgtcaagtccctcctggattcacccttaaagaaaggtagacaatgggaaggaaagaggcagagggttggagataccagtgtgggtagagaaaagaaatgggctgtagagatgggaaggcattgggtcaagggcccccagtttcaaatatccttagggcgcccctgcaagcctcacctcgaaaggtgagcttcacttgtcggtcgtgggtgccggtcagccctgttagtcgttgcacgcgttaccgtcagagccatggtcccagtggcactggcacttcctctgcccgtctgcccttctgcccaccagcccgcccacctgaatcgcctctgactcactggactcacccagcaggtttagcaatccctaccctttagtcaaacacacagggagcaggcctgggggtcatgggtggggagggaggagaggaccgagggataggggtaaggtcctggaggtcaattcagccctccctgcctccaccagctgcaagctggcaggactgcctcagcctccatcctgcatcctcagggagtgagagctgtgatagggtgggagggaggcaaggggagtgaacaggaccccagtctgctccctgccagccgatgaggcctcaaggacatggacctcatgccttttcgtttcttttttctttgtttttttgttttttgttttttggttttttttgagatggggtcttgctctgtcatccaggctggagtgcaatggcacgatctcagctcactgcaacctctgcctcctgggttcaagcagttctcctgtctcagcctcccgggtagctggaattacaggtgtccaccaccacagctggctaattgtttgtatttttagtacggacagggtttcgccatgttggccaggctggtctcaaactcctgatctcaggtgatctgcccacctcagccccccaaagtgctgggattatgggcatgagtcattgtgcccggcctctcctcttttctatctctctctcgctctcttttatttttattttttttactttcttccttctttctttcttttcttttttttttttttttttttcctgagatgaagtctcactctgtcgcccaggctggagtgcagtggtgtgatcttggttcactgcaacctctgcctcccggattcaagcaatagtcctgcctcagcctcccacacagctgagattataggtgcccgccaccatgcccggctaatttttttttttttttagatggagtctccttctgtcgcccaggcaagagtgcaatggtgtgatcttggctcatggccacctctgcatcccgggttcaagcgattctcctgcctcagcctcccaagtagctgggattacaggcatatgccaccacgcctggctactttttgtatttttttagttgagacggggtttcaccatattggccaggctagtctcaaactcctgaccttgtgatccgcctgccttggccttccaaagtcctgggattacaggcatgactcattgcgccctggctaatttttgcatttttaagtagagacggggtgtcaccatgttggccaggctggtctcaaattcctgaccttcagtgatctgcccatctcagcctcccaaagtgctgggattacaggagtgagccaccacgcccagccccttcctttctttctttttcctttttttaaggcagggtctcactcagttacctaggctgaagttcagtggtgcaatcaaggctcactgcagcctcaatctcccaggctcagcctcccaagtagctggaactacaggcatgtgccagtgggcctggctaatttttgtattttttgtagtgatggggttttgccatgttgctcaaactggtctcaaattgctggcctcaagtggtcctcccacctcggactctcaaagtgctgggattacagacgtgagccactacacctggcctcatgttgtttcttgttcatcttcctgttctcagtgcccagatcagggtttggcacatggtagacccttaaaacactgaacaaatggatgaactaataaatgaatcccttagccctcagaagtagtgctgtaggcattcaacacatttattgaattaaaaagtgattaaatgtgtgttcctagcttgcaacatagtaagcattcagctggaagccaggtgtccttaacttggggtcctaggatcctagtgggaccatagaatggctccatggaggctgcaaatctttgaaattttctgcaaaatattgggcatgtgtacacttttgtggactaagagctcatcacttaggttaataaccctaaaacagatgtacaatacttttgctgagtgaagtcatgaatgtatcttgaaatctgaacccataatatgtgaaagtatgtattcactggagttcacagccaggccctttaattatatacatatataaaattttttttttttcagaaagggtcttgctctgtcacccaggctggagtgcagtggcacaattacagctcactacagcctcaatttcccaggcttaagtgatattcctgactcagcctccctagtagctgggtctacaggctcatgcaatcacaccagctagtttttttaagaggtggggtctcactatgttgcccaggccggtctcctgggctctagcaatcctccttccttggcctcccaaagtgctgggattacaggcatgatctaccatgtcctgcaccttctatttgcagggcttgtgctatggcaccctgcagggtgtgcagccagagagaggggaatcacatgtgtctgtcttccagtaacttcatgactccaataactaacacagcctagaaagactggaattaccctgagagcagaaagggtcagggcccaggagctcagaggagggagactagaggcgcttccccaaaaaaggaatgtttaaaatgggtttaggctcccgggaggcggagcttgcagtgagccgagattgtgccactgcactccaacctgagtgacagagcgagacactgtctcaaaaaataaaaataaaaataaaaataaaaaatgggtttaggctcagcacagtggctcatgtctgttgggagcccaagacaggaggattgcttgagcccaggaggtcgaggctgcagtaaactgtaatcatgccactccactccagcctaggctattaataaagcaaaacactgtctcaaaaaaaaaaaatttttttttaaaagaaaagaaagcggccgggcatgatggctcactgctgtaatcccagcactttgggaggccaaggcaggtggatcacaaggccaagagttcaagacatcctggccaacatggtgaaaccccgtctctactaaaaacagaaaaattagccgggcatggtggtgtgcacctgtaatctcagctactcagaaggctggggcaggagaatcacttgaacccgggaggcagaagttgcagtgaagcaagatcaggccattgcattccagcctgggccaacagagcgagactccacctcaaaagaaaagaaaattggcttagagcagtagtccccaacctttttggacaccagtgaccagggaccggtttcgtggaagacaatttttccatggacagggtcgggggcaggggcggcgggtggagaggatggtttggagatgaaactgttccacttcagatcattaggcattagattctcataaggagcacacaacctagatccctcacatgcatggttaccaatagggctcgcgctcctgtgagaatctaatgctgctgctgatctgacaggaggcggagctcaggtggtgatgctcccttacccactgctcacctcctgctgtgcatcctggttcctaacaggccatggactgataccagtccatggcctgggggttgggaacccctggctcaaaggacaggagctaggagcaaagacagaaacccaggcagtgggaagaaatgctgaacgtgttctgggccatgtaatgtgtacagtttggcctgaacacaaggaatgtactgggcggcggcagcagcagcagcagataagattagacagtcagaggagctgggtcttgctgtgtgaccttgagccagtcatggtcccttcttgtgcttcagcttttccatctcagtactgggttggaaagccctgttctgcctatttctccattgttgttgttttgagatggagtctcactctgtcacccaggttggagtgcagtggtgtgatcttggctcactgcaacctccacctcccgggttcaagcgattatcctgcctcagcctcctgagtagctgggattaatagatgtgcaccaccatacctggctaatgtttttatttttagtagagatggggtttcaccatgttggccaggctggtcttgaactcctgacctcagctgatcagcccttctaggcctcccaaagtgctgggattacagaagtgagccactgcacctggccagttgttatgtattcaaatgagtttgagggtctaaaccacatcagacaagagggacaggctgttctgttttttaaaaaggcccagattagacctgaaaccctcagatgctggaggaaggcttcacctccccacagtcttttttttttttttaagacagtgtcagccaggcacagtggctcatgcctgtaatcccagcactttgggaggctgaggaaggcgggtcaagaggtcaggagatcgagaccatcctggctaacatggtgaaaccccatctctactgaaaatacaaaaaattagctgggcttggtggtgggcacctgtagtcctagctactcgggaggctgaggcaggagaatggtgtgaacctgggaggcggagcttgcagtgagccaacatcgtgccactgcactccagcctgggtgacagagcaagactctgtctcaaaaaaaaaaaaaaaagactgtcttactctgttgcccaggctggagtacagtggtgcgatctcagctcactgcaacttccgcttcctaggttcaaccaattccctaactcaccctccccagtagttgggatgacaggtgtgcaccaccacgcctggctaatttttgtatttttagtacagagacggggtttcaccatgttggtcaggctggtctatgaactcctgatcttgtgagcccgcctcagcctcccaaagtgctaggattacaggcgtgagccactgtgcccggctcacctctattaaaaggacccaaaggagttaacggacagaaaacgtggcagaggcagagatggggtggtatggaccagaatttgtagtttgcagtgatttcgccttcctctcccttcttccgtgtgggccctgtggcacctaatgaagcaaggtattgagatcatccctctggagcctggcatgggcatctcccctctgggctagaacatagcttaacagattgtccgtgtgcctcaacccctcaaaaactgccacttccagttcctaacattcttgttttgttttgagacgaagtcttgctctgtcacccaggctggagtgcagtggtgcgatcccagctcactatgacctccgcctcccaggttcaagcgattcttctgcctcagcctcccaagtagttggaactacaggcacacgccaccacacccagctaatttttgtatttttagtagacatggagtttcaccatattggccaggttggtcttgaactcttgacctcaagtgatccactgcctgggtctcacacagtgctgggagtacaggcgtgagccgtcatgcccggccccagctcctcacattctaaggaagttgtgagatggcagttaagaggactgcactcgagggcaggatttgggaattctaatgtgatgcagtgttattcctctacctggacctgtttgcctagctgtgcaacttgtgcatgacatactgcattgtctttcaaaatgtggttgttgtttttcttttttcttttttttttttttgagacagagtctcactctgtggctcaggctggagtgcagtggcacaatcttggctcaccgcaacctctgccttctgggatcaagtgattctcccgcctcagcctcccaagtagctgggactacaggcacgggccaccacgcccggctaatttttgtatttttagtagagatggggtttcaccatgttggccaggctggtctcaaactcctcacatcaggtgattcgcccacctcaacctctcaaagtgctgggattgcaggcgtgagccaccaagcctggccccaaaatgtggtctttaaccaggatcacaaatgtggttgttaaaaatgcacactccagccgggcacagtggctcatacctgtaatcccagcactttgggaggccgaggtgggcgaatcacctgaggtcccgagttcgagaccaccctagccaacatagtgcaatcccgtctctactaaaaatacaaaaaaaaaaaaagttagccaggtgtggtggcacatgcctgtaatcccagctattttggaggctgaggcgggataattgcttgaacccaggaggcagaggttgcagtgagccgagatcgtaccattgtattccagcctggccacagagcaagactctgcctaaaaaataaacaaaaacaaaacaaaagcacattcctgggccaactcagaaattctgcagtatctgcagtagaatcacaaggtgtgcctgggaagctgaatttctataagctgcactgatattctgttacatagcaagagtttggggacctctagtcttctggctgtgaccatctgattcctcattctttcctccatggctcaggtgtgcagcctgagtgtgggtatgacgattggtgggtgctgaattctcaacccacagacccctgggaaaaatgggtctggaggagggacccacagatcctgaatgagctctctgacctgatgtctaggatgagaggagggggctgaagggcttgcagagcaaaggggactaagtatttagaagtgccctgagtgatgccctgctccttcttaacattcattatttgcaaatatttgagcacctactacatgctaggcttatctaggtgctggaggatacagtagtgaatgaaaatctgtgccctgattaagtttatgttctagtgggcatggcaggcaataaggaaataaataaatgggccaggcatggtggctcacatctgtaatcccagcactttgggaggcagaagtgggtggatcactcaagctcaggagttgaagaccagcctgggcaacatagcgagaccccatctctacaaaaaatacaaaaattagctgggtgtggtggcgcaagcctgtagtcccagctactcgggaggctgaggcgggaggattgcttgaggccgggagatggaggttgcagtgagctgagatcatgccactgcactccagcctgggcaacagagcgagactccatctcaaagaaagagagaaatgaaatatatagcatgttagtgacacgtgctgaggagaaaaacaaaacagggaagggggatagaaactggtatttgctaagtgcaattttagatggggttttctaggaagtgctgtgacgtcatcacttgctttaaaagaggccaggcgcagtagctgactcctgtaatcccagcactttgggagccccaggcaggcggataacctgaggtcaggagttcacgaccagcctggccaacatggtaaaaccccgtctctacaaaaatacaaaaattagccaggcatgatggcgggtgtctgtaatcccaactactcgggaggctgaggcaggagaatcgcttgaacccgggaggcggaggttgcactgagccgagattgcactactgccctccagcctgggcgacacagcaggactctgtctcaaaaaataaaaataaaataaaaataaaaatgctgggcgcagtggctcatgcctgtaatcccagcactttaggaggccggggcgggtggatcacctgagatcgggagttcaagaccagcctgactaacatggagaaaccccgtctctactaaaaatacaaaattagccaggcatggtggtgcatgtctgtaatcccagccactcaggaggctgaggcgggagaatcgcttgaacccgggaggcggaggttgcagtggaccaagatcgcgccattgcactccagcctgggcaacagaatgagactccatctcaaaaaaaaaaaaaaaagaaagaaagaaagaaagaaagaaagaaagaaagaaagaaagaaagaaagaaagaaagaaagaaaaaaactgttatagactgagtgccattttagatggggttttctgggaagtgctgtgacatcatcgcttgctgtaaaagaggccgggcgcggtggctgacgcctgtactcccagcgctttgggaggccgaggcgggaggatcgcttgagcctaggagttcgaagttacaatgagctatgatcaggccactgcactccagcctgggcaatgagaaagaccctgtctcttaaacaacaacaaagtcagaaggagaggctgccatggctacggctccaggtgacgtcacggccagctccgtgacgcgcggccagggcagcccgcggagaccgaggctcctctgtgacgtcagcagccggccgggacacagcgggagggcaggtgcggccgcggggcctgccgacttcacgcagggtccgtggggtccccgcggcgcgcagcggctgaaggaggccccagggccttggcgaccgcagcggcggctttagcgtcagtgactaggcagcagggggtcaggatgcggcgaagctcccgcccgggctcggcctcgtcctcgcgcaagcacacgcccaactttttcagcgagaacagctcaatgagcatcacctcggaggacagcaaagggctccggtcagcggagcccgggcctggggagcccgagggcagaagagcccggggcccgagctgcggtgagcccgccttgagcgcgggagtgcccggaggaaccacatgggcaggaagctctcagcagaagccagcgcctcggagccacaactggcagacagcctgtggcgcggcaaccgtgaggggcggggcctcgggtgcgggcggggtcgaccccgggtgagccagtggagggggcggggcctaaagggcggtgctgggcggggacggggctaagatgatatctgggcacctcctacaaggtgggtcctgtagggtaaagggatggtgctaaatgagatcccttaaggggcggagcctcggtgtcctggacggttatgggaaggggcggggaaaatcttgtggttgggtgccactgagggggcgcggcctcaatgttagcgtgagtggctcccaggacaattgggttccaccaagatctaaggctgggggcgggtcatccgtttgggggagggaccaactcttttttttttttttttgcaacggagtttcgctcctgttgcccatgccatgcaatggcatgatctcggctcaccgcaacctccgcctcccgggttcaaacgattctcccgcctcagcctcccgagtagctgggattacaggcgtgcgccaccatgcccggccaatttttgtgtttttagtagagacggggtttctccgtgttaatcaggctggcctcgaactcccgacctcaggtgatccgcccgcctcggcctcccaaatcgctgggattacaggcgtgagccaccgcgcccggccaggagaccaactcttgacggagcctccctgaggggcggggcttcagagggcggagctggagccgggatagggctgcggtgggaccaaagcctgtgagagacttcccagctgtctggcttgtggactgagcaatctgcggcccggtctcgaggggaaaataggtctgtggtccgcaaggccccagtggagcccttgggttcccgcagaaccgactgggtctccagtagtctctgaggagccgctcgaccttctcccgaccctggatctgaggcaggagatgcctcccccgcgggtgttcaagagctttctgagtacgggccaggccagctgcgatcccctctgaccctcgggttcccctctccgaactccagttctctctgagcccccggcccccgtttgagtatcgagcccctctccgagcctcaactcattcctagcccccatccaattatcctagccgaccctctcttcctgagccccaggcccacccccggcccctcccaagccccttctgaacccggacaccacgcaggctgagccccgcctctccctgccgtgggcccctctctgaccctctgtcctggcctcaggcctgctcttccaggggctgagcgtgttgttatccctggcaggagacgtgctggtcagcatgtacaggtcagaggaagggacgctggcgccccaggaacagctctttggagggggtggggagcagggccggaaccttgctggcgcttgagccgattcagatctgattgagtcatgttggcaagagctgggtctaggaccctggggtggggactggagggttgagcaggtcggggcctcagcctccctccggttccccagggaggtctgttccatccgcttcctgttcacggctgtgtcgctgctgagcctctttctgtcaggtgaggggcagtgaattccctggagcccctgccctgggtgctttggaggcaaacccagcacattttctcctacatcctcggtcctgcagctcctggcattcccctgcagaaccccctaattccccctcagactcccacggtcctccccaggcttaaccccctcaagcctctttccactgtccccctatgccggggaaacccattctcttccttttccttctgagacccctccctctctttctccagcattctggctggggcttctgtacctggtctctcctttggagaatgtgagttggggagactgtcttggggtagggggttggcaggttgtgaacccggagattgtgggggtcccctggactgtcggtctgctggggtgggggtagtgccagaggctacaatccttaagaaagggctggatataaacagacttatgagggattgtgcttgagggtctcttgggggctctgatactgggaggtcaaggaggagtcgaggaaaggggacacagtcttcaaaaaggaagccctggccgtttccaggctgaggtaggagcaaggacgacgggagctgagcggctctgtgttttgtcccttcatccaacaggaacctaaggagatgctgactctaaggtgaaagagggcacctagggtgggaaattggggggctcaaagttgcttctttgagaaccttgaaggcgtgggggcctttgggaggtgtccagggggacagggagccaaccccacggcgcccacctcccacctccagtgagtaccacgagcgcgtgcgctcccaggggcagcagctgcagcagctccaggccgagctggataaactccacaaggaggtgtccactgttcgggcagccaacagcgaggtgagccccggcccaccttggaaacccctgatggatccctgctcccagggtcctgagacttaagctccgcccagagccctgcgggatttctcccggtgcccacgaagtccatcccaaagcaaccagctcccagaggtcccgtccacctgtaaaagcagcccgcaagcctcgcccctccaggcctcgccctccctccttgcagagagtggccaagctcgtgttccagaggctgaatgaggattttgtgcggaagcccgactatgctttgagctctgtgggtaagacccggagacactggaagacagagacgcagacaggaaagaggccaagacactgacacagacagacccatgcacctgaccggccgaagacagagcctcggacagcccccacccgcccccagcccccgcgcccccgcgccccgactcccggcaaggcctgggagcctctgagggttacttctcactgttccaggagcctccatcgacctgcagaagacatcccacgattacgcagacaggaacactgcctacttctggaatcgcttcagcttctggaactacgcacggccgcccacggttatcctggaggtgagtctggaaacatcccgggatgggaccccgggcgggacgctgggaaaagcaccaaaaccccgccctacaggcggagcttggctgagccgagggcgtggaggatggcgtttaactcaaggagagacctggcattgctggggactggggcgggctggaggtggagctctgggcgggtcgatggatggggtcgagctgaggcccgggctggggagcggcagcagtcgctctgtccgacggttccgatggtccctccgcccgcctgcagccccacgtgttccctgggaattgctgggcttttgaaggcgaccaaggccaggtggtgatccaactgccgggccgagtgcagctgagcgacatcactctgcagcatccaccgcccagcgtggagcacaccggaggagccaacagcgccccccgcgatttcgcggtctttgtgagtgcggacgaggtcaggaggtgggggattttgcctagagagcccaagcagtcttgagaactggtgccgttatctgagtcttcgcttgctcatctataaaatgaagatactactatttgcctctcagagctgctgtaggttatagtcataaccatatccagatattagttattgcttgcaaagcacttactccgtgccaagcagtttacaggcattcttattttgctgttgtttttgagacagtctcgctcttgtcacccaggctgctggagtgcagtggtgccatctcagctcacctgcaacctcagcctctaggattcaagcgattcttgtgcctcatcctcccgagtagctggaattacaggcgtgcgccaccatgctcggctaatttttgtatttttagtagagatggggtttcaccatgttggccaggatggtctcaaactcctgacctcaagtgatccgccttcctcggccttctgaaatgctaggattacaggcatgagccaccgtgcctgctttgcacccacataacaacctatgatgtactgttatctccccctttaaagatgaagaaagtaatgctcagagaggggaagttatttttccaaggtaatacaactaacagttggcaggattaaatttaaaacctggtttcttcccgggaggtggagcttgcagtgagccaagatctcaccactgcactccagcctgggtgacagagcaacactccgtctcaaaataaataaataaataaaacctggtttcttagagcccacattctgaattacagtgtacgaccatcaaaaaatacatgagaacatgcatatagctattgaatacacagaagatcctcagcaaagttttcttctccccgccccccccgccccacctgtccccctcatagttcctcctttcattcttcacccaccagggcctccaggtttatgatgaaactgaagtttccttggggaaattcaccttcgatgttgagaaatcggagattcagactttccacctgcaggtgtgtttgtctctagggtgaaggtgccaagggagtggggcagtgagggatgaatgatccaggaggagggcagcccttggcatgatccatttgtctccccagaatgaccccccagctgcctttcccaaggtgaagatccagattctaagcaactggggccacccccgtttcacgtgcttgtatcgagtccgtgcccacggtgtgcgaacctcagagggggcagagggcagtgcacaggggccccattaaacatgctgatttttggagtagaattgagttctgctgaaggatactggatcagtgctttcgggggctctgttgggagagctctggctgccgttgcatctaagtatggaggggctgacttcccaatgcaccctcttttcttggagaagtcttgatcaagatcgtaatagcagctcctgtttatggagtgcctaccacgtacaagaaacagtgctgtggacattacacacattacctaacttcattctcacaaccagaaagggaagctgctcaggtcaggaaacttgttcaatgtcacacagctagtgaaaggcagtgacagagcagtacccaggcccaccttcctccagagccagtcctctaactgcagagctgcaggcagcctgaacccacctttgtgctcaattcccagccccagtgggaaagtccccaactcctgctaggtaccggtggaggggtagctacccaccttctgcaggcacacactcaaaagctaaggagacttgataacctctaggaagcttctgagtcacagagctgatgcaggcctggtagcccctacataggttgtcttactgagacctgagttcccaactctgtgtgaggcacagcatagatgatttagtgttcaccagtccctgccctcaaggagcctgacaggggaaagaagagactccaggaaacaggacaatgcatttacagatccaagaattcttcactctaagggtcgaaagtggaattgcagggaaaaaagatggaggagaaggcaacaaaggattaatgagttctacctaggggtaggaaaggaggaccagcatgagcaaagcaacacgcacaacatgcaccatcttggagggcaatgtgcagtatctggtaaaattttaaatataccctttgatctagcacttccacttttaggaacaaattcttcagaaacattcctgttaagtgcacaaagatacatgtacaaagatgttcattatagcattgtttgaaaaaaactgggattcaaatctccatgaataagagacgggtacgctcctacaaaaaaataagatgtaggcattaacaccttcccaatgtgctcatgctttagaagaatatacagactattaatagtgtttatacttttaagaagtgaaattcggcctggtatggtgtctcatgcctgtagtcccagcactttgggaggctgaggagggtggatcatgaggtcaggagatcaagaccatcctggccaacatggatacaaaaattagctgggcgttgtggcatgtgcctgtagtcccagttacttgggagactgaggcaggaaatcacttgaatcgggaggcagaggttgcagtgggccaagatcgtgccactgcactccagtctggcgacagagtgagactccatctcaaataaaataaataaataaataaataatctgggggatttttttataatttgaagatgaaaaagaccccactgagtgctctcaaggcctatttttatttatcaaagcctaagtttagaattatgaactaatgcagcttttctggagggcagtttcacaacaggaaccaaaagccttacaactttttgtactctttactcacagcaattccatttctaagaatgtatccatagaatacatagatgtattcaaaggtaatatttataaggaaatttaacagtgttgtttataaattggaaacttagtaaccaagtagataaactgttataaaaaataagcagccaatagaaatggtaatataagagaatgtctgaagccactgaaagtaatgatatataggccaggcatggtggctcacgcctgtaatcccagcactttgggaggccgaggtgggcggatcacctgaggttgagagtttgagaccagtctggccaacattgtgaaaccccatctctactaaaaaaatacaaaaaaattagccgggcgtggtggcaggcacctgtagtcccagctactcaggaggctgaggcaggagaattgcttgaacccgggaggtggagcttgcagtgagcccagatcgcgccactgcactccagcctgggcgacagagctagactccatctcaaaaaacaaaacaaaacaaaacaaaacaaaaattagctgggcatactggtgcgcgcctgtaatcccagctactagggaggctgaggcaggagaatcgcttgaacctgggaggcagaggttgcagtgagctgagatcgcaccactgcactctagcctgggcaacagagcaagactctatctaaatggtaataataataaatgatatatggataactttttaaaaagcaagttaaactggcataaataatatgtccatattaaaagaattctatatgccaaaggacactataaataaaaagacaacctgggaagaaatattttcaacatgtatgagatgaaggggctaataaccttaacaaaataaaagctataacacatacatgcagactatgaataggctattgagaagaactataatttacaaataaccatataagataccgatccttcatatttaaataaattcgagctgggtgtggtggctcacgcctgtaattccagcactttgggaggccgaggtgagcagatcacgaggtcaggagtttgagaccagcctgaccaatatggtgaaaccccgtctctactaaaaatacaaaaatcagccgggcgtgctggcgcatgcctgcaatcccagctactcaggaggctgaggcaggagaatcacttgaacctgggaggcggaggttgcagtgagctgagatggtgccactgcactccagcctgggcaacagagtgagactccatcaaaaaaataaaaataaaataaaaaataaaataaattcaaactaaaaatgattttttgcttctttttttacctgtcagattaacaaaaggtgtaactttgaccataatttttgttatgaagaataatttgcaatatctattaaaatttaaaatataacctttgatatagcatttccacttttaggaataaatgtttcttcagaacaaatgtttcttcagaaacattccagttaagtgcacagacatatatgtacaaggatgttcattacagcattgaaagaaactaagactcaaatctccataaataagagatgagctaaataaggtacactcctacaaaaaaaaaaaaaaaaatgatggccaggtgcagtggcttatgcctgtaatcccagcactttgggaggccaaggtgggcagatcacctgaggtctcgagttcaagaccagccaacatggtgaaaccccatctctactaaaaatacaaaaattagccaggcatggtggtgcgtgcctgtagtcccagttacttgggaggtgaagcaggagaatcgcttgaacccagaaggcagaagttgcagtgagctgagatcacgccattgcactccagcctgggcaatacagagcgactacgtctcaaaaaaaaaaaaaaaaaaaaaaaggaatgaagcaataggttctgataggtaagacaccaaaatgtattaaataaaaaggtccaagtagtacgtataaatagcccattgataaaaatctatttttcagatctaggaaaaacaggggcccttacctgctccactatttgtacaatgtgtttttgttttttttttttgagagggagtctcgctttgtcacccaggcaggagtgcagtggcgccatctcagctcactgaaagctccgcctcctgggttcccgccattctcctgcctcagcctccccagtagctgggaccacaggcgcccgccaccacgcctggctaattttttacattttttagtagagacggggtttcaccctgttagccaggatggtctcaatctcctgaccttgtgatccgcctgcctcggcctcccaaagtgctgggattacaggtgtgagccactgcacctggcctatttgtacaatatttatatttgaaataacttcatactaacaagcacgtattttaaaattagaaaaaacaaattttaacacatgctaaaacagtatgtgtagacaaaaagttatgtgcccaatatgttttatcaggacatgggagtttgagtgatattttttctgcacttaaaatttttttcttttctgagacagagtctcgctctgtagctcaggctggggtgcagtggtgcaataccagctctctgcatcctccgcttcctgggttcaagcgattctcctgcctcagcctcctgagtagttggaatcataggcacccaccaccacaccaagctaatttctgtatttttagtagagatggggtttcatcatgttggccaggctggtcttgaactcctgacctcaaatgatctgccctcttcagcctcccaaagtgctgggattacaggcatgagccaccacgcccagccagaatttttctacaatgaatacatgtattctctattaagaaaaaattagctgttaaaaaaattcaggattttcacttgtctttaggaccaaaattaccactactccctcccctccaggaagtctaacatagcctttgctccaccttaaaactcatccatccttctccttttgctgctttttatgaagtctgacactttccatctttgtattcccagcccagctctgccctgagggagggaaggcgaaggctgggtgtttagcttactttcaaactttgtatttccttttcttgtgtgtgtaatggggtcttgctatgttgcccagacctgctctggaactcctgagctcaagcagtcctcccacctcagcctcccaagctgaggactacaggtacatgatacccacccctggctgtattttcaaaaacagtgagtcagtgtctctagaatgaatagatatctgcccagaaatactcaactttgagtggggctttacaccagagacatccttcacgtaacaacccctaagtaaacaaactaaggtgtggagaggggatgtaaacattgctcatagcagcctcctacctaaaaacacacaagagagtggtggcaaagcattggtcttcactggtctttattgaatgagggttgtcaggagcaaaggtgggatcaagagcagcaaaagcagaaacaagtataaaagtatcaaaaaatacaaagtgctagcactgaggagagtgagaagggttgggttgtggcccagagggacctctgggacacaggattgaggacttgccacagcctccaagggaacctaggcctggggggcctgtgcaggatccttggctgagggtggaagtggcttgagcggggcccaaccctgggccctgaagtatgagaccagttgtgtgggcacttctgcgagcacggtctgtgccaatgcctcccgaggggcctgccaagaaaagggaaaagtcagtggtggcccagaacagctgcccaaagtctgtatttcatgctcaagaacccaaccatatcccaggcttagaggaaaaggtgagcatcccttgggcctcaaccctactcacatcagggaaaggtgaaagggtaaactcccagatcaaatttgcacctactcacattctggaaccggcggtagggtacaaactgcacaatgtcgcgggcagcagcctgcccagaacgtgtatgcaggggtccaccatcagcgtccagctgctccatggcctcaaagtcagcaccacccacacccacaatgatcactgacatgggcaggttcgaggcacgcaccacagcctcacgtgtggcttccacatccgtcacagcaccatcagtcagcagcaacagcatgaagtattgctggggacaagcccattcatgtcctgaagcagatcctcctcctaaacccctgcaaacaccccagccacacatccccacactcataagaagtcccttgttacaggccgggtgcgatggctcacacctgtaatcccagcactttgggaggctaaggcaggcggatcacttgaggtcaggagtttgtgaccaccccagccaacatggtgaaagcccgtctctactaaaaatataaaaattagctgggcatggtggcacacgcctgtaatccaagctactaggaaggctgaggcaggagaatcacttgaacccaggaggtgcaggttgcagtgagctgagatcgcgtcactgcactccagcctgggtgacagagcaagagtccatctcaaaaaaaaaaaaaaaaaaaaaagtcctttgttccataaccctcaaggaagcccttgattgccaccactgccactgccacccacgactctcaccgaggcagtcccctgatgtgcagcctgggctgcaaacctggccacatggttgatgatgggtgcaaagttggtagggccatagaggcgaacttggggcagggcttggcggtaggcatccacaatgccctggatgcctgcagaggagagcaagaaataccgtaaaatcctggacctctcaggactacaccagtcctgaaatcaccccatcccagcccaggagatctcggaacctgggtgcatttcattcattcacccttgtaaaccagggtacttaactgtctcctacacatgaggaaactaaggttcaaagagaggaggggacttgccctaaatcacagcttgaattagcacccagatgagagggattctcctggacaaatccaggagagtttgagcatcagattataacctatttaataatgatccatttgatacaataaggatccgtactatggattaattactgagggagaagggaaagctcctaataaatgtaaaaggaagaattacacaatcatttgacaatcacagaaatgactgattcaggcaaggatcatcaatggatgttaaaactagagagtatagccaggcacagtggcatgtgcctgtagtcccagctactcacgaggctgaggtgggaggactgcttgagcccaggggttcaaggccagcttaggcaacatagtgagacccccgtcacttaaaaaataaaaaaactaaggccgggcgcagtggctcaggcctgtaatcccagcactttgggaggctgaggcgggcggatcacaaggtcaggagattgagaccatcccagctaacacagtgaaaccccgtctctactaaaaatacaaaaaaaaaactagccgggcgtggtggtgggcgcctgtagtcccagctactcgggaggctgaggcaggagaatggcgtgaacccaggaggtggagcttgcagtgagccaagatcgcgccaccgcattccagcctgggtgacagagcaagactccatctcaaaaaataaaaaataaaaaataaattaaaaaaaaaaaaactagaggggaatgttgatgtgtgtgtgatgagtatttgtatagtctcttcccagaatatacttactaaatagaaaggagaaaatagtacttgtatagtggagaaacctggtagatcttaccttaactaagtgaccaaagtcaacatgactggtaataggacaaatcaacatcatgttcctctgaatatgatgcactgagaatatacagcatcactttggtggtattcctgccaaaaatgtacaacctgaatctaatcctgaggatttatcaggtaaacccaaactgagggacattctagaaaatatctggcctatactgtttatatcatgaaatgtgaatgtcatgaaaggcaagaagtcttccatataaaaagatatgtgctaactgaacgcaatgtgtgatctgagattttcttttgctgtaaaagacattaggacaattggcaacatctgaataaatgctataggctggataatagcatagatgttcatttcctgattttgaggattggtctgtgataatgtaagaaagagtctttgattttaggagatactgaagtactcagaggtaaaaagccaggtggataatgatgggtacaaagctggtagggccatagaagcaaacctgaggcagggctattcactacagcattctccaacacacgtatacatgtgtgtacatacataaacacatatttttaatcttttttcccttgaaatgtgtgaatgtgtgtgtatatgtatacatgtgtacacacacacacacatatacacacacatacacactgtatacatgtatgagaaaagagaaaacaaatgtggtaaaatgttatgttagggtaattgggataaaggtgaagagcccctgtgaactcaggccctgacccctgagttccaagggactgagctcctatgactattcttgcaacttttctctaagtctgaacttatgttgaaatacaaaattaaaattttaaaacccagatcagatcaggtcaggtcagattttccacttcagcttgtgcccccttgggggtactggggagtcaaaaggtttggccctaaacaaaagggcttggtggactctggcaaaatgcaccctgcaaggaggcaaacaaggcttccactgatgctcaagtaagtacctgttagcttctaggcaaagataataacgataatataacagataccatttttcggagaacacttagtaagtaccaggcttactgctttacttgtatcctctccttgagtactcaatttcctatgtttagtcttatgaaaccaaagcacacagagattaagcaacctgccccaagtcatgtggcatcatttttttttttttttgagataggttctcactctatcacccaggctggagtatagtggcatgatcatgatcatggctcaccacaacctcaacctcctgggctcaggtgatcctcccacctcagcctcctgagtagctagaactacaggcgcctgccatcatgctcggctaatttttgtaattttagtagagatggggttttgccatgtttcccaagctagtctcaaattcctgggctcaagcgatccacccaccttggcctcgcaactgagtgctaggattacgggcgtgagccaccactcctggcctggcatgacgatttgattccagaggcctagctctaaaatccaccctctgggtcaggcgctgtggctcaatacctgtaatcccagcactttgggaggccaaggcaggtcaatcacctgaggtcaggaattcgagaccaccctggccaacatggcaaaaccccgtctctactaaacatacaaaaattagccaggcacggtggcaagcgactgtagtcccagctacttgggaggctgaggcagaagaattgctcgaacccagtaggcagaggttgcaagtgagctaagattgcgccaccgcactccagcctgggtgacagagcaagactctttctcaaaaaataaattaaactaaaattaaataaaatccaccctctggacaatgaaggcaggtatctgcccccactctcccttttactcatgcaggcttgcccctctttgtgtggacagacctgcctcagggtggatggggaaacttacctgcacagtaggggttactggggttgaaattcaaggcaaattcatgcgagacctggagacaagaatgaaaatgaggttctttccccatgacctctgctaagaatgaaaaaggacactggcgtgtgccaagattcctataggagctatggagtcctgagcacttgctgtctacgtgcctgcaggaatccaaccctgcatctcctcttaaagctgagtgccaagtagcaagtaaatttaccacatcccccaaaatcaggaccctgaaactgaaaacaggagtggcagaaagagagggagctcacctgccagtcagggggaacctgggccccaaatccaaatgcagggaacagcttgtctctgtgggaggacagtgtattgggcaaaaggcagtgaggggactgtaagctcagaggctgaagcatctgcagggagcgggtatagcccagagaagcaggtactcacgagtcatagtcctgaaccacgctgcccacactccacagtgccatcaggtactcattgacccctgttggactcaggtagtgtagggagtcaggtgaggaggggtctccattggagccagtgaagtccacgcccacctgggaggaggtgaggaaggcagctaaaggccaccctgagccccagacctgttctcttgcccttggtaaagtaacttacagtgaagttgatctgacagcctcccatcacatagtccagaaaggagtactctgtttctacctgcaaatgaaaccagggtcatgcctggggtgatagcagttggtgtcatggagctcaggaatcagagccttggttacatgggcttttgtctcacccgacaaatcttgacacggatagttccagagttcttgtagcttttctttttctgctgcttctcagggtggatgcattcaaactcagcctggtgaggacagaaaaattagggtaggaaattctcagagcatcagtcaaggactcgagctgccttctccttcctctctcccacaagcttcagctatctaggcccatttccacacccctggcaagaccagcactcaccgggactgcctgcagctgggccaagctggtgtggaaggtaccgatgagatcatgtgacccgtcactgtcataatcggagcattgcacctgagggaaaggtgtgtgtggacataaacaagccaggtggcagatgagaataagtccctccccaggttctcttctccagcgcagtccacttagggggcaagctcctcacctggatgggtgtgctggggttcccaccacagaaatgctgaacggggactgagaaacgcttccatgtagggttcaggttgttcttgatgacctgaaggtggaggccaaggcctccagtgagctctggcatggccccctgaggagctgccacacttctctacccacctgcagtctctttctgagttccaaaccttgctagtcacaggccccaggagattatctcctaccccagcccacccaatcccaggggtctcatacctcagatctgtacaccaggtgccatttcccatcaccctggcggaagaactccagaaatggatctgattttcccaggaagtcctgccaatgcgagaccccagttacaagactcaggaacaaacaaccattatgccatccctctgtccacacccccatcccccatacaccatccttggccccttaactcttggattaccagggcctacttccagacacaccttcttatctaggtttctggcctctacctccatggttactacacgattgtcctttaattcctgagctgagacctaggtaggggagactacatcacctcatgaattcattgatgttaagtccctcctcaacccttgctgggttccttaccgtgatggtcccccgcccagcaggttttccaggcttcagcatcaaggggagagtcagtacctggctggacacaatctggggaaaagcagggaagggagtttcaggataacaggcagggttaggtcctgcttgccccctacctccaggcaggctaggttgtctcacagacctgcatctgaaggatcctaatccccagccctacatacctgtcctagggaacactcagcaccccctaggaagtcatcatccctcagctctggcgtcttgttgtctatgtcatagattccaaagcgtagcttctggactgtctcaaagcggtactcaagctgtagagtcttggagaactcagggcttgagcagttccgcacccgttcagtccggccaagctgtgggcagaggccagtaagcatcacagtcacagcctccaccccaaaacacaatcctagcctccctccacaaccttaacctccataatccgcctcacctcagcccagctgccccctcccacatcctgtaaaaggacgcagagtgggtcagacttggagccgatgtccttgtcaatgagatggtcacaggaaatggacagctgaaccaaggtcacgcagtgggccatctgagggaaaaggagctgggtcaagcaccagggagccttctctccccttccccgactacaggtcccagcttgggaaggccagcaggcatcacccaggcagggctgagcatacgtccacccccgtgacacccaaggaagagaaggcctcatagcctccaaacccctccacccctaggtgagctcactggcacagaagatggcagatacaaccaaccctggtctgaagatattgaaaaggggtactagcctccatctacaactgtgaccccaaactatcctcaccctaaaatttgtcttaatcccaatagggctgtccaaacccagactctaatcttggtctttgcaaagaccaataaatctttctgacccccttactggccccaggccagaccctaatccaagttctgatcctaacataaccccaaatataactatgatccagataatatcctccacaaattatcttcttccaataatttctcactaaccctggggatctaactcttgtggtggagttatgatccccctactaattctcctcacctctactgctaatgttcaactcctcactatttccactgctgctgcccaatctaagccatcactgtttgtcacctggcttacagcattagcctcttcaactggtctcccttattctatgctgtctccacctccgttcccccatgtccaccccaacaggctattctaaatacagcaatcagggcgatcctattaaaacataagtgaggccggacacagtggctcatgcctgtaatcctggcactttgggaggccaaggtgggcagatcacttgaggtcaggagtttgagaccagcctggccaacatggtgaaaccccgtctctactaaaaaaaaaaatacaaaaattagccaggcatgttggcgtgtgcctataatcctggctactcaggaggctgaggcaggagaattgcttgaacccaggaggtggaggttgcagtgagccgagactgtgccactgtactccagcctgggcaacaagagcaagattccgtctcaaaaaaaaaaaaaaaaaaaaggccggggacggtggctcaagcctgtaatcccagcaccttgggaggccaaggtgggtggatcacgaggtcaggagatcgagaccatcctggctaacatggtgagaccctgtctctactaaaaatacaaaaaattagccaggtgtggtggcgggcgcctgtagtcccagctactcgggaggctgaggcaggagaatggcgtgaatccgggaggcagagcttgcagtgagccgagatggcgccactgcactccagcctgggggaccgaggttgactctgtcacaaaaaaaaaaaaaaaaaagtgaggtcatatcacgcctctgcctgaaccctctagtacttcccatttcctactgagcttagaaaaactccaaacttggccagatatggtggctcacttgaggtcaggagttcgagaccagcctgaccaacatggtgaaaccctgtctctactaaaaataaaaaaaattagctggtatggtggtgggcgcctgtaatcctagcactttgggaggctgaggcaggagaatcgcttgaacctggcgggtggaggttgaagtaagccgagatcgcgccaccgtactccagcctgggcaacaaagctagactccatttccaaaaagaaaagaaaagaaaaaaagtccaaactataccatggcctataaggtcctggaaggtccagatttctttaacctgatctcggagtgtctctcttgctcactccatttcagccactttgtcactcctcaaataagccaagtttgtttgttccttctttcgtgagacagagtctcactgtcacccaggctgaagtgcagtggtgagatctcagctcaccacaacctctgccccttgggttcaagcgatccctcccacctcagcctcccaagtagctgggactacaggtgtgcatcaccacacccagctatttttttttttttttttttgtagagacagggtctcactatgttgcccaggctgctgggcaactcctcggatcaagcaatccacccacctcagcctcccaaagtcctggcatgatagtgtgtgccaccacacccagccagccaagtttgtttctaccccaaacactttgcagtacctggaatgtgttctttctctgcattatatccacatggctcactgctccctttccccacaagtctttactcaaaataatcttccctgttttatatatacatatatatataaaggctctcccttttagcccctctaaaatttcaaccccactgcccctggcattgcataccccttttttgctttttctcaatgtctaacattatatacatgtatatactgtttcccccactagaatataaattctgtgagaaaggaatatttagctgttctgtttattgctctatcccaagcacctagacaatacatatttgcagaatgaaatctgaaagttcatctccagccccagctccctgcccagccagctccaaactaactgatgtctcgcccttgtaatcaggcagcaccaagcttctctgattcaccccttccctctgctgggaacattattttcttgcatggttcaccacgacaacacctgggtaattccgtcctcctgcagccaccataacaatcaccctcagacctcttgttatccctgtgtcccccttggcccatatacctgaagaccactccaccagcagtgcacacgaggtcagatctttcactgagcttcactcagcattccatgtttcccaaagctataccctgagatgcctccagcgtcagccctcccctatactgatcctcagtcaatcgctcctccctcgcagcccacagcacctcatcttggtccctcatagtttccatctggaatgctgttatcaaagttggaatgcttcagagttcaacttgcttcacatactgcccctccacagcaccctggcccctgcatgaacagtcccagtgatagaaaacccagtcttacaatccaatcatcagaaagtctaggtccatacaaatcctacccaaactgacctaactctgtggaattcttacttctacctggtagttcttccccagcctagggctccatgggaaggccttaccctatctccctatgagaactcatctgatacctggaagctgtgaacagtcccagctgaaatctggagaaacagccgcagttcttttggctgttgcccctagaatgtggcctgcagacttctgaccatcctgatcactcccttgggggttccccaaggacagacccagagcagaatacatgctccctcaagggatcaggatcacagcttcccccaagtcacaatctgaactccatgcatgtcacctcacatgctctcccaggcagtgtttacacagtacagagacaaataaaaaagaatgctcatttcactaatgctgggaatagtgaaaaatctaaggcagcttaaaggtctatcaactaaatatgatacatctgaacaacggaatgctgaatagtggctaaaaaacaagccagaactatattatattggtatcctatgaaaaaatcaaaaataggccgggcgcagtggctcactgttgtaatcccagcgttttgggacgccgaggcaggcggatcacttgaggtcagttcaagaccagcgtggccaacgtggtgaaacccagtctctaccaaaaatacaaatatcagctgggtgtggtggtgcacacctgtagtcccagctactcgggagccaggagaatcacttgaacctgggagttggaggttgcagtgagccgagatcatggcactgtacacaagactccatctcaaataataataataataataggaagagtatgaccattttttacttcaattgtaaacttccattttaaacttcaattgtaggtgtatctttataacagatttgaatacaaacataaataaatacacacacagaaaaatagaagatgcatcaaatgttttaggtagctcaaaggagtggaagataagaattttgtgaactccataattctgtattgtttcaatattttatactgttttgtattttttaaaaggccttatatgaaataaaaaacaaaaacaaaacaagcaaaataaataaaaaggcctcatcagctttccccccaaatccacacctcaaatcttcttgactgttcattctaagcccaaagcctccacttccagttcaacaacccctacctaacttcaggccttattagtctcttgcgtcctgcttggtttctgtcctagcactgctccacctggtcatcccagatgccagcttccagtctctattccaagtaaaagccccgtatagctgcctttaggttcggagccaaactccctagcaaagctaccttgctgcacaactccaaaggacatacctacatagaatttggtagttttgcaatctggtaaccctgcatccctagatcaaccttcaaagctcttcccagtttgccatcagctctacctcctgccgctcactcacccacccaccgaactagtcatccaaagttatttctggttcatctaacacacatgcctgactttcctgcctagcaaatgtcctgtcatccatggttctaatatgacattattcctttatgaacccttgcctgttttccccaaggattttcttgtctctgctctggatgactgcgatgtttcctcattagtgtttctgcgaccatacacacacatttctgggtttattagccaaacagaaacctgatcatgtcatttttccactgaaaactctggaatgcctttccaaaacacttaagataaaacccaaagttcttaccatggtcttcaaggccctgcaagaccttacccttgcctaactaatcatctagccacgcaactatcctccagccaggttggcctttctgatccacatatacctaacaccaaccttatttaccacctcagggcttttgcactctgtctccctccttatacactacagaaaataagctatactagagtaggaactctggctagctccaggacccacagcagtatctatctatcctacagtagatactcatcagtaagtatttagtgactgacttaacattgaagccacaccataatttttacttttgtctgtctaccctgtaaactatggggtccttgaactagggctggatattatctctgtatcactagtattagtacttagtatatagctggtactaataaccatttgctgaacaaatggtgaatgtgcttttgctcaagtcacacttcaggccttgaactgatgtgtaacaataaatctcccctatcctgatcttgtatagttcaactttgaaatttaaatgcaggactcctacaactcaatattaaatgatagtcaattaaaatgggcaaaagatttgatcaggcacttcataaaggaaaatatgtgaatcagaaataagcaaagtgatccacagcgttaattatcagggaaatgaaaaataaaaccacaatgagatactgttacatacccaccacaatggctaaaagtataattaaaaagaccaccaccaccaaatgctggcaaggatatggaactctcatatattgttagtgaaagcattaaatgtaccactttggaaaacagtctggcagcttatcaaaaaacctaacaaacacctagcccaagagcgattccactcctacatttttagccaaaagaaatggaaacattatgtccacaaagatttgtataagaatgttcacagcagctttattcacaatagccaaaaacttgaaacagcccaggtattcatcaatatgagaaccaattgtgatgtttatagaaaactattcagcaacaaaaaaatctattagtatctgtaacatgaataaaaatgaagaataaagtaaacagattccatttatgaagtttcagaacaggcaaaacgaatctgtgatgtaaatattcagaacactggttgtcctcccttctcccccaggggaagggaaggtattaactgagcagaggcagagagctcccagtggaaagggaaacgttcttagcattctaagaatatgggtcacaggagtgtgtgcatttgccacttccatctaaaggaacactgagtgtacacatctgattgtaaaattttacaaaaaaaaaaaacaaaacccaacaacccataaacaaatgttgcactaaagttaaggcatgttgaaatgtttacaagtgtaccgatgactgaaacttttttgaaatccaccaaaaaataaaaggagttgttgaagaaatgtgataaaacaagattttaagttgtaggatctgaaatggcggatatatgggtataatttttttcaactttgctacatgttgaaaattttcataataaaatgttggggaaactattattttttttttagacagagtctcactctgttgcccaggctggagtgcaatggcaccatctcggctcatagtaacctccgcctcctgggttccagcgattctcccactacagcctccagagtagctgggattacaggcacctgccatcatgcccggctaattttcatatttttgtagagacagggtttcaccatgttggctaggctggtattgaactcctgacctgaggtgatccgcccgccttggcctcccaaagtgctgggattacaggcatgagccaccgcacccagctagggaaatttttaattggagaactacaggtcctccccctggtaagaggttgttgtgaatgacaaaagcattagcagtgattatttggggtggtaagattacaggccacaactggagctgctgtcttctcactccacgacttctcaaatgtccccaaaagagatgcccttggtctgggccaaacacgtgtagtgggctactattatcatcttcctgtgtaggcctcaatttctggtggactattccttcctaatcattaccattacaccacttttcctggactaaatcctttttcagttttttgaacccagaatcaaaccccagccatactgttgtgggctcatgtgtgcctcagtaggataaggggctgaactctcactgatgtgagcccctaaggtggcctggcttccattctgaggtcagagcttcctgtgcaagcagttttgttcacagatttgtctccttttctttctcattggaatcaactctttataaacaaatcttttccatctgtagttttctatcctttgagcaacatttcctttaaatgatctataaaccacgggattattaatctcttccaaaacatgtttaatctcctttgaaatctacctctaagcctatctctgcttagaaatctgtgattaaaactgttcatgtcactcttctgtcctacatctcttgaacaactacctactttaaaccagactcatgtatttttcatatactgccattataattaacgccatggactttcaacctcctttttaggaccaaaatcttccagaaccatattaaatatcacatttgagtcaataaaaaaaatttgtcatttatttttgtgatatttgtgcactctttcatcaccgagcacatcttggctcgatgtctctaacagtctaactggttttaccatttccactctcagtcccctcctatctgttatgttgaagtcacagacattccctgactctaatccaacaaaaccccaattcttataatcctatcaaaatgtgtaacttgcttattatgtatttctcctcttggactgtaacttcaacaagcagagggaccagattagtcttgcttctgtgccaacgcctggaacacagcaggtgctctactgatatctgttaaatttatgaatgctaggaaaggagtgatactcaaggatcctcagaaatgacccaaatctagctctgacctgctactgagacactgagagaagtaggctttctaggaacacccaacaccaaacaccaatttatcttctctgttaggtccccaccccctgacccttccatttgggactagtcgggtgttgcgaatggaacagctgagtctatagctccaacatttttctgcctctgctttctaccacttaggagttaccctttatagtttgttttcttctgtttactccctctgccaacctcaatgtgccctagcagggcacattctctcagtgtcccttaagaaaggcatactcattcccatttttataacttaaaattcacaaaatgtcagaaataaaaaagaactgagtggccatctaattcaagtccctcaatccaaggcatagagggaagatgtggtttggctaaggccacatatatggttaagtgaaatgaagactagaactcaaatattctgattcctacctaatctcaaaccttggactgttgttagacttttttcctctctttgaaaagcccccctttttatattgttgcaatctgatgcagtgggcaagagtgtgggttctgcagtgaagtgaccaggctccaaatactggccttattccttcctagccacaataatgacatactacaacactaaattgatgtcatatctatataacttgggcaaatacttaatctcactaaacttcaggttcctcaggtgtaaactgggggatagtatctatttctgaagattaatataaataatgtatgcatgatgcttagtacagaggctggaactgctatgaccacgtgttagctattatcgttatccttcaagcctagcttatatatgctccccttttcatgatctttccagcactcaacttctcactctggaccactatattcaattcatgccacacgactgtattctgtcgatgtttctccagcttcttgcctgtcaattaaatgacaaagctcttcagaataaacactgtttcagcatctcctgccacacagcatatacctgagcacataatgggaattcaaatacttgaggcaagtctgcagcagtgtgctggcgcaagcttgtatggcttgcaagagccaactgttacatatcaggaaatcgttgaagcaggtggccttggtaagtttaaaactgtagaaattgggcaactgcaaaaagtcatggcttccttcaccctgccagccagtttaccagcatactactgtcgatagggaatcccattctctgctacaagggagtaacttgcccttcattttctatggccacccttcccttgccttgggaggttctaattttcctattcataaccaagaacagatttctcctgggtccagtgggatctaattcagtgccaaatgagctgaaattcatttgtcagtccttaacacttccctcttccacttccaaagtcctaacccagaaaggcaccagcctgcaattcccaattccttatccaccccaggtaatgaccagaagttgtacagaggctgcaagaaggtggcatagagggctgaaggtctgggtggcagggccactcctttaataaaccaatgtcatgctcacactcctattgcctaccttggcatgctggatcagctcacagatgcaggatcaagtcttgaaagccaatcagaaaatcctccataggcttacaaaggaccacccatggaacattgtttcccgtaagactgaaaagacaaactacaccaaccaccaccactcttctttttcctttttggccccatcaaaggacatggagaaggtagacaagttttcttatccctacttttctaactcgaggattctccaaatttacatcagcagctctaaggatattcctcacaggtcacaaactgaaccaaaaatgaaaatcctttctataaaactacacattccttattcatacatatgactaagggctactgaatggtactcataaactgaaattttcaataaatttggtttagatccatatactactaaggagtcaggctgacacaaagtatttggcaacactacaaagcttaacatgtgcacacaaaaactaaaaggtgggaaaatatgaaaaagaagatggccacaaggttttccactttactgtactgggtgaaggtcaaaaacaaaaaaccaaagccactaatctaaccccaacatccccaaaggcttatccaaaagttgaacaaatctgaccactgtacaactaactcttcaaaaagaacctaacttgacgacaaaactggatatggagaaggaaagaagcaaactgaggaggactacatggtcttcaaaagcaggatagggccatctggctgtgacatctgtcaccccattgatcaccagggttgatttggctgatctggctgactaggtgggtgtccccttcctccctcaccgctccacatgcatctgtcccgaagctgcatgctcgattgaagacgaccatccctgagagaggaggactggtctttggtcaaggatatacgagtgctcccctgctagaacctgcaaacaggctctcaaaagcaggataggactgtagcggagtgggtgtttttctctgcccagagactctgaacacaccaacacaaagtcttcacgtgagtacttcaaaataagttcaggcagggtgcagtggctcacacctgtaatcccagcactttgggaggctggatcacctgaggtcaggagttcgagaccagcctggccaacatggtgaaaccctgtctctactaaaaatacaaaaattagccaggtgtggtggtgcacacctgtaatcccagctacttggcaggctgaggcaggagaattgcttgaacccaggaggcggagctgagatcacgccactgcactgcagcctaagcaacagagtgagactctgttgcgaaaacaaaaaaacaacaaagtaagttcaggtccccctctgcaatcataagcttgaccgtggaggccaagaagccctaccaataggtaagggccctccacactatagttggagttggcaaactgaaaaggctccttccccagcagctcagaatccatgacagaagactgctgccagtggcctcccactttccctaaaagtcagggaggggctggggatagttgagggagggtttctacctgaggagtcatacaagcatccatgattaaaacatctttgttttccccttactattaattatttttctctgcctggattaccccacctgtaaagtagggatgataatgttaactttacagtgttatttgtgaggattacatgaggacagtcatagaaagtatcccctgcccggcacagagtaagtacccagtgtcaactgtccctgtaggtgctcacaaacagggaagtgcacctttgggtccttctgcagtatcattaactccttcttggttaattggaccaaggaggagtggatccaggaggaatgcctctggtctacctgctccaggatataactagcaggacagggacagcccccaaaaggagagatgaagactcttcccctttgaatttctcaagctgcagtgtagaatcactaccacactagggaaaccaggagagcagtacccagatcaaaatttggagctccattcctggtcactttagtttaaggtccaaactcagtacagatttccagaaaccgaatggctaggttcatacaatcacagaagcttaaaactggacacaagcttatctaatttaatcccatactgtaaaagaaacactgaggccagagggaaataatctgtcctaagtcacataactgatggaaccacgaaccgattctgagaatgttatttctatatccaaccattttagcaacagttcacattttgtaattcaccccaatctgaaatctaccctgccactacaacagcagtgagactcacatggtctcccctcatgatctatgctaatgttagccttgcacaaacatggaatataattctccctatttgtctgactgctggggaaggaaggtaggaaatcctggactccacatttacaggagttgatcaaaggaataaattttaagtagcaagcatgcatagtgcaaataaggtagaactcacctctaaaaaatgtgatctgtatcaaaattttcaaaggacatctatagggtagtcaattctgcccccatccctcccggctgaaatctacattcttttaatgtctatcacctgtggggtgtctgagacaacagtactataccgccttcctgatgatctccaggactgaggcatcaccaaatacctgtgcatctacagtgtgcacaaaaggagtgtatatctcctacagcacaaaatgagatgagtaaatgaacaaaagcagaccagagctcttggaaaagaaacctacctattgttcataatgcaagccccttacccttcactggaataaattcatttgggacactggggagagtttaagatgggtcttcagaatttacatgttagggaagccgagaaagcaaaggaatatttcaacaacaggaaactacactatgacaaagactagtttacacttgttcctgtctaaccataacttagcaaatggccaggaaagccactacctggttcccgtggtataggaatgtacctagtataagcacaaccaagcacttagttgtgacttaaaaccctcaactgttgaagaacaggaaccttattttgcttttccaccaaagtataagtgctgggtgcacaccactgcaaaaatctgttagtatgagatacagctatggctaagctgtacattcatgtgaagttgtcttaaaagcttgaaggtgacaggtgcttccaattccaatctgtcaattcaatggtcatagaagtaaagcagctcatctacatcagtaattagtagttgcattaatgtccatcacttcagtcagagttacagcacagggaccctactggtcccacaggccaaaccacagaagggagttatgtataaaggctgggccactctccagcccccactgcaatctaatgtgtggagtatagtggagtgtggcattaacaaacttccaagtgggatcacagaaaaatcaaggcaatcagaggcactggtaccagttggtgtgatttaaaaccttttaagaaactgaggccaggcatagtggctcacacctgtaatcccagcactttgagaggccaaggcgggagcatcacttgagccccggagttcaagaccggcctgagccacatagtgaaactacccctccactccaccatcacccctaccccagcaattacctcatctctacaaaaaaattaaaaaaaaaaaaaaatagctacttaggaggctgaagcaggattgcttgagcccaggacatcgaggttacagtgagctgactgtaccactgcactccagcctgggcagcagagcaagaccatctcaaaaaaaaaaaaaaaaaaaaaaaaaagaaacaaaaaaactatttaaccctcttaaatccttcccactgtgtgacttgtggtgtagcacaatgtggttgttatcatttgatatgaagcacaaactctaagtgacaaggctttttttttttttttttgagacagggtcttgctatgttactcacgctagtctcaattcctgggctcaagcgatcctcccacctcggcctcccaaagtgctgggattacaggtgtgacccaccacacccagcctgacaagtcttatccaccaatcaaaagctatgaatgaactactcccacccattaggaggctgaggctagagacagcagtgaaggggcttcagtctaagagttttaagtcctggttacgagcaggtttactatataagcaagcaaagggaggaaatgaacagcagcagaatggaggtaatgaaccatcaagtagcccatttgaatacagtacagctcattcctaaaatgagttaaatacactcaacacctttgactgttcatactgaattatgttctcttgctgggcattgccccacaacgaaatagtcatctcctatcatgaaatggcaagccattaattaagcaaaatgacttgaaactagtaagttactaagatcaatatccagatgtctggaacaactggggagccaattccaatgctcagctgtgccatttaccacttctctatatgacgtttgctgagtctctatgccctaacctttaacattttaattaaaaaaaaatagggccgggcatggtggctcatgcctgtaatcccagcactttgggaggctgaggtgggtggatcacctgaggtcaggagttcgagaccagcctggccaacatggtgaaaccccatctctactaaaaatacaaaaaaaattagctgggcatggtggcagatgcccataatcccagctactcgggaggctgaggcaggagaatcgcttgaacccgggaggcggaggttgcagtgagctgagatcacgccatcgcactccagcctgggggacaagcgtgagactttgtctcaaaaaaaaaaaaaaaaaaaaaagagcgcttcacaaattgcgtgtcatccttgtagaggggccatgctaatcttctctgtttaattcgtttttaatatgtgctgctgaagcaagcacatcttaaacattttcactggaaggaggtccgtggggctattgacagaattcaagggatttggttgtgatttttcccagcactctttcctgcccttagactttcagagtgctgtccttctgtccctgggtctgaaatgtttatgtcaggtggctttttcctccttctggactccagtgatagagcagtatgtagagtagcaagccaccgtggctactcactgctagttaacgttgatccagaaaaggagtcatactctaggatgcttttgagactctaacacaaagcagccaaagcaccaagaataaacccaagaacagcatggtaaagaattaccatttaccagctgggcacggtggctcacgcctgtaatcccagcactttgggaggccgaggtgggcggatcatgagatcaggaggtggggactatgctggccaacatggcaaaaccccgtctctactaaaaatgaaaaaaaaaaaaaaaaaaattagctgggcttggcggcacgcacctatagtctcagctactgagaggctgaggcaggagaatcgcttgaacccaggaggtggaggttgcagtgagccgagatcgcaccactgcactccagcctgggcaacagatacagactccatctcaaaaaaaaaaaaaaattaccatttacctgagcaggagatgaacttgcttatgttgttgaatagacaggggttttcccagaaaagtcactgtaacatcagagaattgtgctactaccagagtacactctttccagaacatttcacaagtcaaaatgatcagattctatactaaaaagataagactgaaataaagccatttttaataaaaaaggaaagccataagtttgattctaccataccctgtaaaagctctacttttgggagattagtgatgatgcacatagttgataaactatttcttgctgtaaaacactggaaagcaggtaacaatgaattacataactgatctctcctgaacaagaaaaggagacatattatcacacagtccacccctttcagatggtaaaagccattttggatatctgtaggcagctgatttcactcagtgatttgtccattgcttagtcaaatcccgattatttaataatggctcagctactacctggaattatatgtctagccccctctaaaacacactgggtatccaaattctaatacaagctaaactctttcaagataaaaagttttcaacatttaagggctttgtttgccaacacatcatacacataaaattctgaaaaggtggatactatggacttgaatcaagtttcctccctgctgttccaagtatcctcttctcttgacacttcagcattagcaggcaaggataagcaacaatttttacctctccaagattaccaaatctacctctccaaaggcacaaaatattttcaggtttaaaaacaaaacaaaacaaaaaccctgacaagataatattatagctcagtaaagtacttttgtgcagttaaagcattaaaagcatcagcctgttttattttttgacaagtttattgaacagtattcaagacttcatctttataaacaaaaacctctgctgagtgatgccaaggcagtatttgctggcaatgttgtggccatattggcaacaagccattttgttgtgtttggtttctaaagtctggactactatagaactgccagtaaaacaatttaaatgtggcaattttgcaagggtggaaaataatttttaaagtgaccacttccagaaattctttccaaaagatttgactagcagcaattttacattttctttactcatttcccgagtgttcttaaaattgatgagattttacacttggcccatacctgtacacaaccacagactccagtaaaagggagctggaatttaaggctttcacgcatccttgtttttatgcaaggctgactatttccacctaaaaatgtaatgtttgcttacttccatacagtcctagattttcatccagtgggttaagactggccttaactacactgaatattactacctgaaattttaaataaagtttcctaatcgaattttcattgttgatgctttgacaacttggagtacaaagctaggaactacatttcacttaacactgtttcattttttaaaaagccactaataataattgtacatccaaactactgtgtaaacacagaacacacctccaaattatgcttgtgaactaaatgtttcactaaagttcagaaaagtttacaaatttgcttatttatgacatacatttgtagatttctctaatcctttaaatcaaaagaaaaatgaacaccaataaaaaaaaaatcagaagggagaggaaaaaaaattaaatctaatggaaaatattctcttccattaatgtcagagtcaccaaaaacagacaataaaatttacacataaaattgaaaatatcatgatagtgtttacaaatgcacacaactttgagcaaagctttacaaatccttcataccatacaaagcaaatgagaaaataatgtcaattcatttctaccccaaacctagttcttaggagaaaattcgcaggaagagaggtatgagtagtttcacagaatacattttcaagaattttttaaaaactgaaactccaatgcccagaacaagataaacagtatccttagcagttagcactgttaataaatctcagatacacaaaaatcaagttccagagggcaaagcatttaattacagtccacaacgagcactgttgtgattcatataaaacatagttctctccaatttctacacaaaccgctcttttaatttatttaattagatgaacaatgaaatcgttttccttttcagcatttatctaagatgtagaaataacaaagtagttgcaataaagtgtatgaaatatttaataagaatgtacgaacatataaccaaaataaattgtgaaaaaagataaaagactttcatcttcaaacaacccatttttctaaaatgaaaatagctttccaatggagaaaatatctgtggctgaaatacaactctcaagcagtgctgaagttttttgcattgtctttggaatgagaaatgattacttaacattaacttaaattaaacagcatatacaaacgttatattgcttttgaaattgaggaggcagtatctagtgatcggtcaaagcaaatctgtattcatgaattatcaaaagacccacaacatagtcacctcttgagtctaaacaatccttctcttaaacaaaaatcctgtactgtcaatcctctaagattgtagtgataaaaagccttttcaaatcttatcaaatgaaactgttgccactcttaaattacacaaccgctgtatttcagtgttccactgactcacaacaccaaaaaggcactgtatatatatatagtttaataggaaatacttattttaaaagactgacccctttgtaactacgctgatttgtaggaaatgttggggatgtttcaaacgaagacaaaggggccatgtaaaagataaaatttggttttcatgatctctcatctatctctccttctgtattgtttataatgtgacacattttcagagcattgactagggaaagtaaccataactagagccctgtaaggccaagtttttcatcacaaggaaagtaaccataattagagccttttatgacagtgagaaaatttgtttttcatatcatctcacctatctccccttccgtattgtttataatataatgtgacacatcttcagagcactgactagggaaatcataattagagccttgtaaggcaagtgttttcatgacaaggacacttaccaaccagaactcatgtggtcctcctgccttagtgtcctgaataccaaagaaaagagtatgaaagggtcaagaatctcaattttctcctctggcggctgcacttgtactctgtatgaagacttttagtaaacaggctcctgatcgaacaactatgccaaaaagcctccaaataacaggactaacacgtatcaatctacgaaccagcatacggatcttttattctatactactactgctaacaaagataatttcaacttcagttttaaaaacctagatataacactttcttatgaatgggcccctctttgtttaaaggccaaaatttcacataatcgggacaggaggaaattgatactacaattagtccatatgaaaaggacttcaaatcaagtatcttaaacacattattaaaagtggtttctggttttcgataccatccaaacaacatgaacaatttttaaactgactaacctaaatcgtggcggtcaaaccaaaaaggctctggtagataaaggactccatagtttatttttatggcaaaagtcttattccacacagttttaagtgtgacattagaaatcaaagtttgaggttatagcacaaacgaagtgtggacttttatatttagggaaaaaaaccaacaaaacagttctgctcatttacaaatgagtcaattagacaaacaaagcagcaacttctgaagcaggactgtctatacagcaaggacccttaagaagcaataaaggtacatacaatgaatctgtatacagaaattttattcaattttaaaagaaaatgaggactttagacaaagctttaccctataacaaagcaaatctgtccagctttaaaccaaattctgagagtagccaacttctattttcagcagctggcaagagcaccctcaatgagttctactgacatttctattttcttcatcccatatggtataaaacaaaaccaatctagactccttgataagctttatgtggtcatttgagttttacaaatggtttctctaatggtatgccaaaatcatttatgtgttctctccagatagctttactgtaacatacagcaatgtttatcctggtgagtgagtcttctgtaaacagtcaaccaatgctctatgttatggaaaccaagctatatgcaattgaaacaatccacaggttctaacctggaaatactaggaaaacaatctggatgcattaatcacagcaatatgaagatctaccctataaaaaatgatgtgaatggctaccctaatacaagttttacttttcttgaacctataggcctgtcatttaagtcaatgacagcagctgtggcttcatcccgagactcaaaggccaccatggcttcacctgtgggcatacctttttcattgtattttaaacacactgagcctgggattacttgatagccataaaagaaatctaaaatctcatcaatagacacagtaaagggcatgttttgcactttaattactgtcggtcctggttttccagaactagatgcaaagccagggggaccaccaatatggattgggccagggccggggccggggccggggccaggcccaaaagctggtggcccacccaaatgcccaggggcacttccaagaccaggagggccacttccaaaccccgggggaccgcctaagctaccagggccatttccaaaattctgagggccccctccaaatcccgatggcccacttaaattgtttggtccacctccaaaacccggaacatccagtcctagaccaggcaaaccactgtttccaactgaaggcataccaggcctagcatcaccaaaggccccgcctcctaatcctggaggagggattggtggcccaaaggcatttgatccaccaaaattaccaggaaagttaaatggaggcccattattggcttcctttgatcctacagtcaggaaggcatgctcttcacctcctgcactaggtattcctgcactgggcattcccgcaccaggcagtcctgcactggttattgctgaaccaggcagtcctgtgctgggcaggcctgcaccgggaagtcctgcactgggcagtcccacaccgggcagtcccgcattgggcattcctggaactgcaggattacctggcacaggcatctttaatcccttttttccttgggcagggggatttttctcaatctctctcatatcttctagggtaactacatgaacaaaagcttctctcccattaagttttttacggtgtaagcgttcagacttacgtgcatcatcttcatttttaaactgaaccaatgcctgtcctagaccttgcccattgttatcaacaagaacatgtacagcattttcatccactgggattccttctaggaactgaagaacatccatctttgtaatgctgaatggaatatttgttatgtgggcacagactttggcagagttgacatccccctctggatttagtatcatttccctctggtcatagctgaagttctgcagtctttttcgaatcatatctatcttttctagcatacctttcttagtaattggatgaacttgaataaagcgattgcccatgtactgtttatgacgacacagagcagccttatagtcagcctcatttctgaactctacaaagccttcgccagttgctttcccattgggtccataagctatataaatactatcttccacaatatccagctttttaaaaaaatcaatgacatgtttgttttctgcttcaaatggtagccctttcaagtaaacacaaaaaccagcctcatgtggtgatcttgaccttgatcttttctgcccactgggcgattttgacctgggaagtgtctgaggagggggatgagtttgtccagaaggtcccatattttgcttaaaagtgatatggcctccagcagctacccactgtctttctgtggcagggctaacttccacatagcgttgaatcatcagcattctgtttcgtttcaaagcttcaaatgtatcttgaggggagagaaacttaaccaatccattcccattatttcgacctacatgatctttcaacaaatgcactgcatcaacacggagcccatgaaaaaaatctctgacatcattttccattgcagaaaagggcattccatgcacactgacatacagatcatcagggttgatggggagtggcttcacactgctctgagagttcatctggatagggttaacaggattcaacggaccaagaaacataggattcagattattgttcaaattcataggtgctccagagccattcattccagcaggtagaggtgccacaggtggcggattcaagggcggcatgcccgacatgggtggcagtggggtcatgggtggcacagaaggaactgggggaatcgggggcacaggaggcacaggaggcaatgtaggtactggaggaggaactggaattgggggaatggatggcattggtggcagagatggcatcgctggaattggaggaattggtggcggcgggactgtgttcattggagaggctgtgcttggaacagttgagctaaacgttgggctcccaaaggaagcccccatatttggaggagctgttcctacgctggctgtggaaaatgtctgtatgtttttgttgctttcatgaacagaagtggtggcagtaactacactgggtgatggattattaaagttggatactgttgtgggcaagtttaccctgctactcattcctgagctaggtggtggtcctgatctactggcatttgctggtggtatatctaagttggcagtttcaaaacgcctacgactcagttcaatcatattctgcatttccgtcttactactcaacaatagtgttacttttgaccctttaattgtaccacctgtgcgcatcataccaagccttgcatcttcatcagtggcaaaaacgatgaaagcctcacccagttcaccccctacaatatgcacgcccccatcaggaatggtcaatccagagaagaagtggcgaatgtccatggtccccgccacaattgggagaccttgcaaacggatgaccacagccatgctgcgctgaaaccacacacacctgcagatgagaaaaggcaacggccaggtcagactcctgtttatcacaccaagtttttagctacaagaatgaccagctaccatattaggccctcaaatattccctcaagctatcacaggcaatgtctttaatttagatattctaaaaactgaacattacgtgccatttacaatgtaaaacgtagacaatttcaacttccagaaggcattaattttggaaacagttcagtcccaagactcaaaaagttcaagaaaaaacaactgtaggacagtaaaatacatatacatcattcagaccactaatcattcagtaagatttaaaagaaatgtctaagtcaaatcaggaaacaaagtttaacaatctatagggaaaaaacatgcaaagaatatatagaagttagtatttaaaactggcttagcatcttccctatatacttgataatttcatagaattatcaagagtgtgattttatagagctcagtctcaaaatccatccaacagaagcaaaaaactagaatactaatgaattgtaaataatacttaagactaaaagtagattcaagtcttaaatgagaactggttccattattttattcatcctaaaacttttcaatctgccttgtacattacaaaaaactacatatggaattatttattataaacaaggttaagacatactaagaagccaaaagaactactgaataggacagctaaaatctgagttaccttgattcattacccccaaaagtagaacctggttatagtcccattcactgtgactattttaattaaaactcaggtccaatgactcataaccaaatcctctatttaataaaattttttaaagtattattttcccctaggagagggctgacaataaaaatattttttgtttttgttttagaaccagagtgtgaattactcagtggttgttacagtcttggacctacacaactcctacaggatctctgtgatctccttagatcatgcctgttttgacataatcaaaaaagaaatgttcccctcaaatttcagtatttcagttccaaaggcttctaagagcaaattcaagggcagccctttggaaagtgacacaaaccgaattattgggcctgggaaacatactactttgaaattaaggtggtcaataacatagggtgttttccaacccatctgaaaagtcaacttttatttatttatttattttgagacagagtttcactcttgtagcccaggctgcagtgcaacggcacgatctcggttcacggcaacctccacctcccaggttcaagtaattctcctgcctcagcctcccaagtagctgggattacaggcatgcgccaccatgcctggctaagtgtttgtatttaggagagatgggatttcacctgacctcaggtgatccaccctcctcagtcttccaaagtgctgggattacaggcgtgagccactgcgccccacctgaaaagtcaacttttaaatataagcccataaaatcagctcatgaccctcagaaaggttataaattaatgaagagatttggttttatcacttctcaagaatattagaaggggcaagattttctactataagctctaagaattctgtaacttcattgtcaaatattatataaatactaatgcaacaaaatctgtaattatatctcaatattacaactgccgtatacaaacaagaaacaaactgcttggctttgacagttttctcacagacacatacacaaaaataaaaagccaccttcaaatttaatccagaaaaatggactagcaaacagaaaatgctttttgtgaggccattataaagcactagaaatttgggaagtgtggggaagcttttcatttacaaacttcaagagtcaacaagaaaaattaacgctaaaaaacatcacaccaacagtctcttttctcatttactatttagcagcctataaggaggttcatcaagcagtttccaagtcattaaatcaaattcacattccttgctcaatctagaatatgtggctgtatgcaaaatgtgatagcatttcctgttcaacttcaaaaaacggttaatcactttgtataggggaaacatcatgggcaatccaggtactcaaaacaacttgagagagagagagagactagtttgcactgggacaatcaaacagaaacttgatatagtcccaagaacacaaaaattaaacacagggctaaagtgacatacacagttaagtcttcaagccattttctgttaagagcagggatttactgaaagtttgtacaaggtacacatgagaatatgctattgaaaatctgcctcagattaccagctggaaagggctgaatattaaaccaaagtggaatacaagatttattcataaagccatctgatgagaaaaattgtttctagcttccaaaaaatatgaaataatatccgcagccaggtgcggtggctcacacctgtaaccccagcactttgggaggatgaggtgggtggatcacccgaggtcaggagttcaagaccagcctggccaacaaggtgaaaccccgtctctactaaaaacacaaaaaattagctgggcatggtggcaggtgcctgtaatcccagctactagggaggctgaggcagaagaatcacttgaacccgggaggcagagatcacgccactgcactccagcctgggcaacaagagcgaaactctgtctcaaaaagaaataaataaataaaacaaataaaaatttaaaaaaaaatttaaaaaagtatctgcttttctgttactaagtaactgtttgacagctaagtcatttcaacctaacttgggcctatcttagttacttaaacaagagggttagattccacttgctaaggttccatttaaagtctaaaatttgtactctaaaacatgtgacccattatctatacttaaactcttaggaaatataaataaacatatcaataacaagcatctgtatttgtaattagtctaaaatgctactaaggaataaaacttactgcctatcaggaaaatcacaagataaatagatccatataaatgaaattgacccccaaaggaacaactgttcaaagcacccatctaccccacccctatccctcagataaacttgtaaaaaaccacaccggcctgggtggcggctcatgcctgtaatcccagcactttgggaggctaaggcaggtggatcacaaggtcaggagttcaagaccagcctggccaagaggataaaaccccatctctactaaaaatacaaaaaaattagccgggtatggtggcaggcgcctgtaatcccagctattcgggaggctgaggcagagaagtgcttgaacccgggaggcggaggttgcagtgagccgagatggcaccactgcactccagcctgggcaacagagtctagcctgggcaactgagcaagactccgtctcaaaacaaaaaacaagcaaacaaaaacacacacacacacacacacacacacacacacacacaatatagttgctacatatattttcatatttcttaataagctatctcattttattttgtataaaaacgaactctctattcaaaatctcttacctgataaaacaagagatgaatttccttaacaagaagtagaggccaagtcaatcctgtgggcaaccaattaaaaccaacttttagactgcaatagagaataaacggaggcaaaaatcaatgcaggaaacacaaaacaacacgcacaggccacactgtacattacgaaggcgagtctgaaaccaccagagtacttcattagaatgcatatcaaaaaaaaaaaaaaaaagaaagacaccgtaacaaaatcccacacatgctttttagttggtattgctttcaaatttgagtatctcaaaataattatatatttacaagagtgtcattaacttagcccaataacgaatccactgaaaattaaaacagtcataaagctcagcttcacagctaattgctttgatcactttataattaaaccagtccagaaaactccgtaacacaagtctatttccccaggttctcaccaaatttgtgatgaaaaggcacaagttcgcacaataacaattcttggacaacttaagatagcaattcaagggtactcatggaaattactgcaattattctttcaatatattttattttgcacaaaatagcatccaacatcacaaaacaaatgaagtatgagttcttgctataaggactaattccactggagctcaaaatattaacaaaatattaagggaaagtgttttttcctctgacatcacaacagttctcaaaaacttgtaaaatttaaataaataaaataaaataaaatttaaaaacaccctaaaaatgcctgacatattaagagtatatcccaaaataaaaacaggtcactcatctttcactgtcatttcttccaaactggtgaggttattaacaagtcacaagcatatatgaccaaatgtctagacaactatattcaaaggtcattttttgctttttattttttttcaaaggtcatgttttaattcggagagagaagaaatttgccactgttcagtattaagattacctacgactacttttccaaatgatgctcatcttaaattagtatcttccaagaccaaaatacaactaatgaccttaatattcatcgccaaaaagtaaaacatatttcaaaaatctgtgtgattttctaaaggacaaactattcatcgtctagtcaactactcaagttgctaaagaatagtgagatggttttaccacaaaaagctatgcaaatatgtaatcaacacaatcaaaagtctagagcattgtattaatcttttacatgttgtagaaatctagcctcttttttttttctttttttgagacagggtatcgctctgtcgcccaggctagagtgcagtggcgcgatctaggctcattaggctcattgcaacctccgcctccctgggttcaagctattctcatgcctcagcctctggagtagctgggactgactacaggcttgcgccaccacccgcagcttatttttgtatttttagtagagacaggggtttcattatgttacccaggctggtctcttaactcctcacctcaagtgatccacccgcctcagcctcccaaagtgctgagattacaggtgtgagccaccacgcctggcctagcctaactaagtctaaggagtttaaaaattcttcatttgaaagccatatctagtagtttaacaggtcacaaaggaaaatgtgaaacagaaaaaaacctgcttcaagtaaagcaatgagcaagagcatgaagtactgtaatatttatgtacaggtttgactccagcagccacataacagggtaactttctagtttctagaacttgtaataaacatctgatccctactggagattccaattcaaaaggtcaggtatggggccagggcatatgcctgaatataaggtaagaaggttcctctcagcctcttcccttgcaaactcaaaagataccgtatgtctatcttgagaaggacatatctggggtcagccagttaagctcaaagggaactcaccaggtctactctcaaaaatttctaaaaggttaccagaaattacctttaaaaggaagatatttctcattccacaaggcaaggctgaaaggcccagctgaatttgacaaatgcctagttcaagttttatgtgtacaacttaaagcacaaaatcaatccagatagaaatttatgattctcttctatttcagcaaagaggaatacccaccccaccccataccaaggaaaaccatgcagaaagttgatgctacaagtcagaacttcacaacccttggtattatacctcttcaaaagggaaaggtaaatggaaatagaactgaaatacttctgtgttgacacctcactttgtaaaaaccacaagaatttaacataagtgtcactgttttccaggaaactactattcctgtattctaaatgtcagctagcgactgaatgcaggatttcaaaaatccacgccatttacctaaagctttgctgaactttagaaggataagactaaaataataactaaacaataaaacatctaaaatacatattctatctatacatacagcataatgataggaaaggagaaaatgggcctgatttgtcattaaagccactgatatacttcagaagatctaaaacaagaagctggctttagtatgttttccattcatattatcaggaattagtcctaacataaaggcttgcttcaacttgacaaaataccggatgcatgcacaaatcacaagtatctgctacaaaaatttaacatattatggcaagacagactttcgtatttactagccattctaatcacttggaatttcagaaaaaaatgtctgacaacaaatctcttcatcaagaagtcaaggcacaaactaaaacgactattttcactcttcatctggtagtaaacatccaaaagtgaactttaactttgttcagttatcactctttaatcaacaagaaccagggtacagcagagctaggttcttcagatccaaaagaaacaaactctcaaatgttcacctcagagattagcaacagagaaccaatcacaacgggcacaatgctaaaaacagtataatcacattataataaacattatgaaacaaccacagtttcagccacttgattttgttccccattcccaaatggaccatatatcaaagtctgggatcactcttaatgaaaaaattattctgacactgatggagatgtgtactttttataacgcattactcaatttttccattaacctccattccgtactcaaaggcagcaaatcagaagacatttctaaataagatattcctcctgtcaaaaatattaagttatgtttcaatccccccaaatgccaacaaaaatgttgctaccttcattttcacttcagagcaaaattatacttctaacctaaacaaccacattcactctgtttttgagtcttaaaagctggctttaaacttaattaaattttgtgcaaaccaaaaggtatatgggtgtggtagtaaaatctgataaaactgtagtttagataaaattatcttttctgtttagttgaaaacatttaacaatattcctttactccatgaacatttactattaagcacttgtgggccagacaaaagatataaaagtggacatcatcagtctctgcattttagggagggacatctaaaagcatcttttgtgcaaccaactactgacacttggttcttcctacaacatctacagaagaaaacatacattcatacaatgacagaatggctctctgcaaaatggagtaaaaactatcaacactgtcactggattccagcacctggaacacactggcccacaacatcaagtttcacacctaaagactgtactaacaactcccaaactctcaatactcaatcatcaaaacatttgacgtgtcaaagaaggtgaaagaagcccaaagagtactggtattagcatgtaacaatacgttgcaagtaaccacacaattatttctaaagcttcacatttttcatctaacagatttgaacataaagaaaatgaaaattatacattacaatccataagcaaagtaatcacatttaatcgagcatatataaaaatgtattccctgtttcattaaaaatctgtccaataatatatactaagcacatcttcattgttttgtataaacacgccaaacatttcactttcttcataaattaccataacgttatttgaaccacctgtaacagttcttcccaactttttatactctttgaaaatgtctgcacactttccactaaatccagaaatcctccattcttatcaaaactgccaaatttcaaaaacaagtacaaccagtcttgtattgtagttctataatttaaaaaacaagatttccctatgtgtccagacttgagggatttttctcgactgcaaatgctctgagatgcattaacaatatacactagttaacaaggtcccagacaattcttgttgctaagactgcattttgcaaaaattacaccatttcaaaccattcaagcaagaagctctaaaatactgcagtcacaagcctagcctctcccttcaacaaaccttcagttgccatcacacttttttccagtgggttatactgactctattattgaataatataaaacggtccctaccaacttcttcaatttatattaggttatctctgagaatcctggagccaaggagggttttagggcccagaaatctcttaaagtctgcaattctcagcatgacaccacgcagatgagtaaatgtttagcacttaatactgagtaaccctcacaagagcccctcagatttgtcactataaagcacacgttggaggcacacaaaaagcccgtacgtttacaacctagcagctaagcctgctgcactggcgtccaaccccgtcactaacctgtagatcctcaaagtccctcccaccacccaattcacgtggctgcaaactaatgcagccaagcttcagagaaactcaattaactctccatcaaaagcacccaccctccgcagcccactggatctcgtcctcctgaaatgccacaggatcctctcccgagggagccgtaaatgtgctgctcacagcagccccttccctactgggggaccaaaggcctggcatcttactacaattctcagagcctcaggaggcgtactcaccccaccccctcacctcctagcttcagacgccggcttctcaaaactgctacaccctcgagtaaagcccctccccagcaatggacctcggaggcatttcactgcaaacccctccaccttcaggccacgaaggcggccggttgtgacacttcctttctgaactcacaggagtgtaccgactacagcttcctccccacaggtgtgacctgggtccccttttgctggtaggccacaaaggcctcctttccatttcgggttgaaggagtgtcctcactacgattatctccccacctccaggcacagagatgtagttataacctctgcttcactgggggagacaagaaatcctccgtactcgggatgtaggcgtgtttttactgcagtccccgttagctcgcaggccgctgagccagccagctctggcctgccccctctcagaccacgggggagtcctcgctatggcctcgtccccacttcggtacgcaggctcatcctcttgcgtcctccttgcatcctctcagatctcagaggcctaagtggcatcccactccccctgcagccctgcctcgaccctttgtgtggggcgctagttgccgcgggctcgaaggcctccgaaggccccgccccgggccaccaaggggcaccacgagccccgcacagccccacccgttcaggggctgcgggagtcttaccggggaaagctgcgcggcaccagaacccagaccccgaattaccccccgcgcgagtgcctccgccccgcggccgacagccccagcccgaacggcttcccggagcccaacgcagccaccacctccttcgccgcttcacaaaatggccgtcggcccgctcagcggctccgcgttccagaagggggaggaacggcgtggttgacgtcaaggggccgcgcaagcgcgctgacggtctcgggcgatctcccggaagttactgggttttgtgctaagagggggatattcagtccctgcttgcgactgttggcgcacaggaccgaccttgggctagtggccctggcgggtgggctgggtatgagtgtctagcttggcccttcactgcaagactgtgcaaattgcttcacgtcttccagtttccgcggaaggagcgaattgtgcttacctctaagttttttgaggattaaatggaccacaacgtggtggctagttattatatcctgacaaaacagccaaaacctgattcttttttcccatttaagagtttatacaggccgggggccgggcgcggtggctcacgcctgtaatcccagcactttgggaggccgaggcgggcggatcacgaggtcgggagatcgagaccatcctggctaacacggtgaaaccccgtctcttctaaaaaatacaaaaaattagccgggcgtggtggcgggcacctgtagtcccagctactcgggaggctgaggcaggagaatagcgtgaacctgggaggcggagcttgcagtgagccgagattgcgccactgcactccggcctgggcgaaagagcaagactccatctcaaaaaaaaaaaaaaaaaaaaaaaaagtttatacaggccgagcgcggtggctcacgcctataatcccagcactttgggagtccgagaagggcggatcatgaggtcaggagttcgagaccggtctggccaacaaggcaaaacccagcctctactaaaaatacaaaaactagctgggtgtggtggcggtgcttgtggtcccagctacttgggaggctgaggcaggagaatcgcttgaacccgggaggtggaggttgcagtgagcccagatggcgccattgcactccaccctggatgacaaaagcgaaacttcgtctcagaaaaaaaaacaaaaaaagagttttaatctagggcagggcgcagtggctcacgcctgtaatcccagcattttgggaagccgaggcgggcggattacctgaggtcaggggttcaagaccagcatggccaacatggcgaaacctcgtctctactaaaaatacaaacattagctgggcgtgctggctggcgcctgtggtcccagctaccagggtggctgaggcaggagaatcgcctgaatccgggaggtggcggttacagtgagccaagataacgccatagcactccagcctaggcgacagagcaagattccgtctcaaaaaaaaaaaaaaaattaaatccatcgtgacccctccacggcttcactatagtattattttattatagaaaaagctattctctggctgggcgtggtggcttacgcctgtaatcccagcactttgggaagccgaggtgggaggatcacgaggtcaggggatggagaccatcaggagagcgagactacatctcaaaaaaaaaaaaaaagaaagctgttctcaagccgctttgggcctagccccccgaacttcatgcccctgctaattaaaagctggatgtggtggcttaagtctgtagtcctagctactcgggagttagaggcaggaggatcccttgagcccaggagtccgaggctgcagtgagctatgattgcatcactgcactttagctcaggtaacaagagcaagaccctatcacttaaaaaaaagaaaaaaaaggttgaaattatcacaattccaacaacctttcgggatttctatggcagactggactggtgctagcccagtatgccaaaaacagcaagttggaaaaccaggccacactgttaaactaaacctatgctttataggtttttataggtttgctctgtgtaggtaaaacatagtccattaaaaacaaaacctactaaatgcaatgtagcatccagggttggatcctggaacagaaaaaagacaggaaaactggtgaaagctgaataaaatctgaagtttaggccgggcatagtgcctcacacctgtaatcccagcattttgggaggccaagaggcaagaggattgcttcaagaccagcctgagcaacacaggcccagtctctataaaaaaatctttaataattttagaaaatcacgtttcattaatactaatataccaatgttaacctctaagttttgacaaatgtaccatagttttcttttgttgttttttttttttttttttgagacagagtctcactctgtcatctaggctggagtgcagtggcacaatctcagctaactgcaacctccacctccaggttcaagcaattctcctgcctcagcctcccaagtagctgggactacaggtgcgtgacaccacgcccggctaattttttgtatttttagtagagacgggggtttcaccgtgttagccaggatggtttccatctcctgacctcgtgatccacctccctccgcctcccaaagtgctgggattacaggcatgagccaccgcgcctggccttgttttttgagacggagtcttgctctgttgcttaggctggagtgtggtggcaccatcccggctcactgccacctcggctcactgctacttctgcctccagggttcaagctattcttgtgcctcagcctcccaagtggctgggattacaggcacccaccaccatgcccagctaatttttgtatttttagtagagacagggtttcgccatgttggccaggctggtctcaaactcctgacctcacgtgatctgcctacctcagcctcccaaagttctgggattacaggcatgagccacagcacccagcctattgttgtttttgagacagggtctcactctgtcgctcaggcttgaatacagtggtgcgatcaaggctcactgcaaccttgatctcacgggctgaagcgatcctcccacctcagcctcccaaatagcttggactacaggtgggcaccaccacgcctagataatttttgtatttttttgtagagtaaaggttttgccatgttgcccaggctagtcttgaattcctgagctcaagcaatccatccaccttcgcctcccaaagtactgggattacaggtgtgacccaccacacccagccaaattagcatagttttatgtaagactttttaattagaggaaaactggtaatagatctacaactctactatctttgcaacttttcagtaaatctaaaattattctaagtaaaaaagatatttttcaacaagaaaaattctataatttcatctcctccttccactgtccatctacatttaccaaactttagcccagtggctttcaaactttcctgtccccctgctactggcaagtatgaaaagcaattaaacttttttgaccattatccacaataagaaatacatttataacctggtatacaaattcaaatatatcatcaaaatatattcttaaaatatgcataaatgtactctaacatactatctccttttttaagtactggtaactacccacctatgggttcagacccacaaatgaaaagctctagttacaatggccttctcttggtttctaaagtataatactttgtgctttatcacacttcaggcccttagctcttgccattccttctcacctctcatttctagattagcgagctcttcatatttataagcactacctcctcagaaaaactttcctcaaacacccagcatggtaggttttccctgctatgtcctcttaccacttaattctttcatagcacttatcacaatctataacattgtttatttgtttaattattttccatctctccactaaaatttaaaactcagtgagggcagggtcttttttggtcctgttaaccagtgtattcctaatacccagaacaaatctggctcctggcaggcattcaaataattcttaaatgaagagatacaaaagcccactgagtcatttatgcaaatcagatggagtggcggtcttctccacaattcccaagtacagcttccacttttccctcaacctctcataaagtcacagagtaaatagaaggtgagtttatttctccagtcttgaaattaacaattttcaagaaaacaaattattagaataactggtggagtcacagacatatttctagctccattaggtcaaaggaaaggaaagaggacaagggtagaaaggagacaagccctctaagaaactgtccattcagtctgtctgcagtcaatatgaagagatagcctttggagctacagaaaatattacattgaagtggattatgcttgctgttaaagaagctggtccagccgagcagcagcagaagacgaagactcaaatgtccatgtagagcatcatggtccctgaccaaagagacttcttctggttcctcttgctctcctcaccaagagcacagatgtgcccagcagcaatatgacagcaaatgtctctatggcttcgggatgaaaatgtccacacactttaagacccgagaagaaatggggagtgctccacacccaaggaactgaagctagggaaagacagttttcttgtgtttctgtcatagaggtggactgatgctgaagtcaactggtctataccaatctagagcatccactaggtgtaacaaggtgtctggttgtgcacgggttggtgaggcaggaggggccagaccagcacaaagtcagggccctattcttctagtgttgggtccacttgatgctcttgaggtcaatgccatcctgaaccatctcccagagagggctgccaaagagaagaggcattaaatgagtgagggcttagataggaagtcgacaacattggccccaaggctctgagcaatggcttgcctccttctgtccctgtctgtcctctgcctcttgccctggtagaccctaacacaggtggttaaggtatcctgagctctccagctccctgtaagtccttgtcagctctcctgagagctctccccaactgctaacaggaataactaggttcctcaggctcaattgcagtggggccctgagccaatggacaccaaacatggtcatattcttgaagctttcatcccactggtaagaggctatggccatggtttcccttggaggaaccaagacccttgagacttgtataaacatctagtttaagcctctcttcatatgacatgtataagcagctcgtttcagcccaccacatattacccgcttttcagcatttgtttcttggttttgttctagttcccagttaggggtggaacttaaccctacatcatcttggtatgctgtacccttacccagttcttgcccgtttcatctccccagagttggcctgtgcttccaatatccctgggtctaatccaaaagaattccttggatcttagacctgagcatcccatctcacacaagagctgctgctaagaaatctctgctaagctctgatcgatccccaagcagaagcttggatatcttggataatgttcccagaccagatattacttcagtgtgctatgaatatgggattttacagtttagatttcaccaggtaattttatcaaatttcattatattcttgacttgtccctcttctatatactaaacattcccagaatgcctttctattcatgagattttccatggcccttaaagttagccatctccttcctgtccttcctctttagggaagaccacttattattataggctcacaaaataagactctgagagctaataggaccaggctgcattcagtttgtaaagggtcagaaggaatagggtgcagatgccgaagccacatagataggaaacaaaaggctttgctggccacgtggtcagtagaaatgccttgtgagtataccacagaataccagaaagtgaggacaaaggaagggtcctgcagttgagcaagctatagacacttaagcaatacagctagaccctacaaagaaaaatccagaacacagaaaggcctgggagagctcataaagggaagcagagtatatacctgaaattcctctctctaccaactagatcaagagaatcctgaaagtcaaggttaaccaagacagagccaggctctgaaaaaatctagaggcctcaaggttccaggaggaagatgagctctgtggctactaggggaagccctggtgccagctgactggccaaggatctcattacctttataaacacattgattgattgattgagacagagtcttgctctgtcgcccaggctggagagcagtggtgcgatctcagctcactgcaagctctgcctcctgggttcacgccattctcctgcctcagcctcccaagtaactgggactacaggtgcccaccatgccaggctaatttttttgtattcttagtagagacggggtttcattgtgttagccaggatggtcttgatctcctgacctcatgatccgctcacctcggcctcccgaagtgctgggattacaggcgtgagccaccgtgcccagccacagaaaatatatttttaaaattagctaggtgtgggggcacacagctgtagtcctagctacttgggagtctgaagcaggaggataacttgagcccaagagtccaaagttacagtgaactacaactgtgccactgcactccagcctgggtgacagaatgagacactttctctaaagataataataatcataatgaacaatactacctgggccaggtgcggtggcttgtgcctgtaatcccagcactttgggaggccaagacaggaggactgcttgagcccgggagtttgagaccagcctgggcaacatagcaaaactccgtctctacaaaaaatacaaaaactaaccaggcatagtggcacatgcctgtagtaccagctacttgggaggctgaggtgggaggatcacttgagcttgggaggcacaagttgcagtgaggtgtgattgtgccactgcactccagcctgaataacagagcaagaacttgtctccaaaaaaaaaaaaaaaactactacctgcattacctgcattcatctagttctttagtttgttgtttttgtttttgtttttgttttcttgagacggagtctcactctgtcacccaggctggagtgcagtggtgtgatctcggctcactgcaagctccacctcccaggttcacgccattctcctgcctcacctcccgagtagctgggactacaggtgcccgccaccacgcccagctaatttttttgtatttttaggagagacggggtttcaacgtgttagccaggatggtctcgatctcctgaccttgtgatccacccacctcagcctcccagagtgctgggattacaggtgtgagccactgtgcccggcttttttttttgggacggagtttggctcttgttgctcaggctgcaatgcaatggtacaatcttggctcaacgcaacctccccctcccaggttgaagtgattctcctgcctcagtctcccaagtagctgggattatagggatgcgccaccactcccggctaatttttttgtattttagtagagacggggtttctccatgttggtcaggctggtctcgaacttctgacctcaggtgatctgtccgcctcggcttcccaaagtgctaggattacaggcatgggccaccctgcccggcctagttctttagtttttaaaaacactttctcattgtgaagacaagtagccaagaagatctactttcttgctttgtggaatctctaaatcctaagatccaagtacgcttgaactttggttttggcagtgtaaacacatagcctaaggacaagaggggagacagtgctagagtttcttccaaagcgtctctgatacaatatgtatacctcatttctcgaagacgcttcacatgctgaatgcatttctccactgtgtagtccacttcctcctctgtagtgaagcggccaattccaaacctgaaaaaaggcacaggagaatggctccccatcagagctctggcactgggataaattcattccgcaaatactcactaaggatctacgacacaaaagatatggagagaagaacatggtccttcccctttaggcagagtttctcagaacatggtatatggatcggccgggcatggtggctcacgcctgtaattccaacagtttgggaggccaaggtggacagatcacatgaggttgggagttcgagaccagcctggccaacatggtgaaaccccgtctctactaaaaatataaaaattagctgggcctggtggcacatgtctgtaatcccagctactcaggaggctgaggcaggagaattgcttgaacctgcaagtcagaggcttcagtgagctgagatcatgccactgcactccagcctgggcgacagagtaagactctgtctcagaaaaaaaaaaaagaacatgatctacggaccaccaacattaaaatcacctgagatgttttctactcctcctccggacctagtgaatcagaatatctgaatgtgggactcagatatcatatttcacaaacttcccaggtgatactcaatgaagtctgagaaccactgctctagaaactttcacaaggttatgagaagagataaggagaactcgactgagaaaaacttcagggtggaaaaagaaaaaaactgtaacaggagatgaaaaatataagaggatgcctttcataaatgttgcagctcaactcactgacctgatagaagagtgcgctaaatcctcatcagtgccaattgctctaagcacataagagggctccagggatgcagaggtgcaggcactgaggagagagacacgaaccttgttcagttcatcatcaacgtctacttttagtcacaaaccctcagtcttgttcccatcccccagggccctggagtcataccctggagaaaacaagagaccttctaatctggcagaactaaaggacctgatgctcccctgcacatcctaggatgtgtgaacctagctcctctggcccccatggtggatgacttccttaagcaaggacgctggcaaagtgtgacagagcatgataccacatgggtttgacaagaagacgcagcagaggaccatgtgctcacttccccaggacgtaatgcaccatctgcaccagcctgaagggcagccaaacacttagtggcctttggagcatcttcaattctagaggcctgtaacagaactgctagtgtaacccacaacagacacatacatcccctgggacgataaaaggcacaaaattctaccccaggaagtcttcctagggtggtaaacttcagtctgtacccagctacccagccaaccaaaaaaagagaggcacttacaaaatgacctttacccttaatcaagaggtcttgtgcctatcatctccacactgggaagtttaatagcctgtatgactcttctaagtggccctgccgcaggccctgtctatgccgtccagctcacctccctgaggataaggcaacgtccttcagtgccatcagcagactttccccttccacatatgcaaaggagaggttgatacagcctggaggaaagaaatactgtgagagaggtctcagagtctcagcctctaccagaatgaggatagaaagagcaagtccataccgggataatggtgcttagggtccccattcatcaccacatctggaaggctcttcattatattctgtatcagccgctctgacaactttgagattcgcttgtggtcatactaaggagcaggcaaggaaggattaggcagtaaccattaaccagctcagaaagacagtttgagaagcccttctcctataactggaagtgactatgtatcagccccacctatcatcctatgtactcatggggaccactgtatctccagtactgagcatagtgcctggtatgcaaaaggcgcttgataactggacacagggttcatttacttatccagaaataaatgagctgataactactaaaaggccatgggttttgaagcccataatgtctccctcagaacaaggtgccagcagcaccaggacaaggaagagttttcttaagccctctctccctgcagagatctgcctcagtcatgctgagaagcctctaaataggagacccagcacaggggaagaagttgtgggagggaactgctctccccatacctccatctcttgctgtgccacctcacacgcagcccccagccccaccactaagggtgtgggcactgtcccagaccgcataccccgctcctgcccccctccactctgcagggcctccacacgcacacggggccggcgacggatgtagatggcaccaacccctgggaaacaaaatttgttacaaaaaacagaaagagagaaaagtagataaaacaaaatatttctttccaaagggatcaaaatattacttcaacttttctgtaagcatgaaatttttctaaataaaaaacgttaaggaaaagaagaaacagcagtaaaagcatagtatttagtaaaatatttaacatctggaagataaatgccagaaggagtaatgatcaaaatggtttaaagtagctccctatgctatatgaaatgccatcatacattacagtattattcataatagcaaaaatactgggaacaacttagatgtccatcatcagggtaatggtcaaatagattatggcatgtccatacaatgaaataccaagcaggtgtataaaagaatgagggggccgggtgtggtggttcacgcctataatcccaactgtgggaggtcaaggcgggcggatcacctgagatcagaagttagaaaccagcctggtcaacatggtgaaaccctctctctactaaaaatacaaagattagccaagcgtggtagcaggcacatgtaatcccagctactcaggaggctgagacatgagatgaacccaggtggtagaggttgcagtgagctgagatcaagccactgcactccagcctgagtgatggagcaagactctgtctcccaaaaaaaaaaaaaaaaaaaagaagaagcttgttctgaactgacaccataaaatctccaagatacattgttacaaaactggtgaaatccaaaaaaaagtctgtactttagcttgaaaaaacaaagatgtattggccgggcgcagtggctcacgcctgtaataccagcactttgggaggctgaggtgggtggatcacctgagttcgggagtttgagaccagcctgaccaacatggagaaaccccttctccactaaaaatacaaaattagccaggcatggtggcacatgcctgtaatcccagctactagggaggctgaggcagaagaattgcttgaactcgggaagcagaggttgcagtgagctgagatggcaccattgcactccagcctgggcaacaagagcaaaactccgtctaaaaaaaaaaaatgtattatgggctggacacggtggctcacacctgtaatcccagtgctttgggcagccgaggcggacagatcatgaaatcaggagttcgagaccagcctgaccaacatggtgaaaccccgtaattattaaaaatacaaaaattagctgggcgtggtggcacgcacctgtaatcccagctactcaggaggctgaggcaggagaatcgcctgaacttgggagccacaggttgcagtgagccaagattgtgccactgcactccagcctagtgacagagcaagactctgtctaaaaaaaaaaagatgtaccattaggtgaaaaatgaaagattgaaacagtgagtacagtatgctatcatctggataaaaaagaaagctggaggagaagtatatatttgtttgtaaacacataggataattgtagaaaaacccaagaaattgcctcccaataaccagagaaaatcagaaaaaaaaaaaaaaaaaaaaaaaaaaaccaagaaagaaattacctccccagaagggaactgcatagctggaggtcagaggtgagaggcagacttttgtctgtgccttttttttccctttttttttgagacaagagtcttgctctgttgcccagactggagtgcaatggcacggtctcagctcaccgcaacctccaccttcccggttaaagtgattcacctgcctcagcctcctgattagctgggattacaggcacccgccaccacgcatggctaatttttgtatttttagtacagacggggtttcaccatgttggacaggctggtctcaaattcctggcctcatgatctgcccgcctcggcctcccaaagtgctgcaattacaggcgtgtgccactgcacctggctgtctgtgcacttttttgtagcttttgaattttgaatcacatgaatattactttttcaaaataaaatttaaatttaaaaacaatttggtggagcacggtggctcatgactacaatcccagcattctgggaggccaaggaaggagaatcacttgagaccagaagtttgggaccagcctgagaaacacagtgagaccccgtgtctacaaaaaaaaaaattaaaacttagctgggcatggtggcatgcacttatagtcccagctactctggaggctaaggcaggaggatcacttgagcctaggaggtcgaggctgcagtgagctatgatcgtgccactcactccactccaggctgggcaacagactgagaccttgactcaaaaaaacaaaaaacttaaaaatgcgtataacctgtgactaaacaagccgaattacagaaattttgtgccaaaatatgagcatgagcatgcaaagttattcaccaagtaatcagggcttctgaatagaattggcacttgacagttctcccacacagaaaaactgtttatgctgagaatggaggtactataaaaattaaggcagtggtttccaaatcgattatgaaggacaccagattttaaataataagctgggtgcagtgggtcatgcctgtaatcccagcactttgggagactgaggcgggagggttgcttgaggtcaggaattcaagcctgagtaacatagtgaaacctctatctctacaaaaactgttttaaaaattagccaggcattgggccgggcacgggattacgcctgtaattccggcactttgggaggccaagggtgggtggatcacctgaggtcaggagttcgagaccagcctggccaacatagtgaaaccctgtctctactaaaaatacaaaaattaggccgggtgtggtggctcacacctgtattcccagcaccttgggaggccgaggcgggcagatcatgaggtcaggagatcaaaaccatcctggctaacacagtgaaaccccgtctctacaaaaatacaaaaaaaaaaaaattagccgggcgtggtggcaagcgcctgtagtcccagctgcttgggacgctgaggcaggagaatgtcgtgaaccctggaggcggagcttgcagtgagccaagatcacgccactgtactccaggctgggtgacagagcgagactccgtctcaaaaaataaaataaaatacaaaaattagccaggcgtggtggcaggcacctgtaatcccagctacttgggaggctgaggcaggagaatcgcttgaacccgggaggcggaggttgcagtgagccgagatctcaccattgcactccagcctgggggacaagagcgagactttgtctcaaaaaaaaaaaaaaaaaaaattagccaggcatggccgggcacagtgggcctataatcccagctactcaggaggatgagagaggagaatcccttcaacctgggaggcagaggttgcagcgagccgagatcacaccactgcactccagcctgggcgtcagagtaagactttgtctcaaaaaaaaaaattaggcgtgttggtgcacacctgtagtgctagttactggtgaggctggggtaggagggttgcttgagcccaggagattgaagctgtggcaaggtaggatagcaccactgcactccagcctgagcaacagagtgagaccttgtccctataaaacaaatgaataaaataatgtattaaactgtatttattaagaattatttcatttctccatttaaaaaaattcaagaatcttatactatctgagtctaaacagttcccaaattcaaacagcaagtgctcaaataccatgtctgaacagtgaagaatgccacattatctaaatctatttagattctggacttggaaagcaggaggttggataatgagggacacctgtacacatgtaagtgttgatcagagcttctgatcaatgagttcattggttttttgtttttaaaatttttgtgagtacacaggaggtatatatattatggagttcatgagattttttttgtttttgagagggagtctcgcctgtcgcccaggcagtggtgtgatctcggctcactgcaacctctggctcctgggttcaaacgattctcctgcctcagtctcctgagtagctgggattaaaggcacatgccaccacacccggctaatttttttatttttagtagagacgggggttcaccatgttgatcaggctggtcttgaactcctgacctcgtgatccgcccgccttggcttcccaaagtgctgggattacaggtgtaagccaccgtgcccagcccatgagatgttttaatacaggcatataatgtgaaataggcacatgatgaagaatggggtatccagcctgagttcattggtttttatcaaaaagacttatctacaataaaagccaataaaagcaacattttattaaaagacagaacgcttactgggctttttgaaataataactcacaaaaaacactctacaacctctgggaacccttagaagacgccatcttccataattccagaagctattacacctacttccacaaggtatacacccagataacacaccctgcagacataaaaagggtaccagcacagacatcaacccaaaaaaggccctcacttgagaaagaggagttatattttatatttatattttatggttaccttcacaaaacagaggacaacagtctattcccaagggttaagggaaagaggcataactcaagcttgaacacattccaataggaccatagggaacaaacatgtatccttgagagactaacaggataacagactatgaagtcttctaagaataaacacaaagatagctgggcttggtggctcacatctataatcccagcactttgggaggccgagacgggcggatcacgaggtcaggagatcaagaccatcctggctaacatggtgaaaccccgtctctactaaaaatacaaaaaaattagccgggcgtagtggcaggcgcctgtagtcccagctactcggcaggctgaggcagaagaatggcgtgaaccagggaggtggagcttgcagtgaaccgagatggcgccactgcactccagcctgggcgactgagcgagactccgtctcaagaaaaaaaaaaagaacacaaagagatgtcaaatcccatgcaatcttcccctgagctatagcaagacactgggaatgagggactcaaatagttgctctgcacatcatagtggggaaaacaagatagctgggcctatctagataaatttgatttgacaaaacccatttttcctcaaccaaattaagatctacatgcttgctaaggatttgttaaagagagcaagaaagaatggcctgatgtatagtaactgctaaggtctacaaacaagcaagtgtttctggctattgctaaatgacatttgcattctacaagggactctgaatgtacaacttcctctgagagcaacagtagtcccaaatgactgtgacaaacatctatcaaaggtcttgctggaaggtacagagagaaggaactctagaaggggctggtacctttgggaccgtagattttgtgaccactaatgctcatgagatcaattttcatgtcattgacatcaagtgggatttttccaacagcctgggctgcatcagtatggaaatatacctttctggaactgcaaatccgccctgaggaaacagaggggaagacccacagcacaatgttggaaagtcatctgtcagagtcccacagtgcactgtgaattatctccaatagtaaatgacctgtaaatattaaactcctcccctccctccttctaccccttctccttcctcttttccttccctcctcccccttcccccttcctccctctctgtgtctcagtagcttcccttctttagaataaaaaagatgaagggcaaagcaccagatcgaaacactcgtgatattcttatgcatacaattctcaccacctcattaacaccagcctttcaaaatgtcagattactttctagatcccttttgattaaaaaacaaacaaaacaaaataaaaaaaaaaaaacaagattaacagatctttgtgctaatgtgcctaaagaaattacagggcgatctctatgtggggagaatagagatgttctaaaaggaaaaagagtagcaggcttttttgttttgtggttggttttggcagcaactgcaataaaattaaaaaccataaaaggtgctagacctggccgggagcagtggctcacgcctgtaatcccagcactttgggaggccaaggcagacggatcacctgaggttaggagttcaagaccagcctggccaacatggcaaaacctcatctctactaaaaatacaaaaattagccaggcatagtggtacacacctgtagtcccagctactcaagaggctgaggcggtaggatcatttgaacccagagtgaggaggttgcagggagctgagatcacaccactgcactccagcctaggtgacagagtgatactctgtctcaatgaaaaaaaaaatggtaatagacctggattcaaatactgcctatgacacttccaatgtccttgaacaaagtacttaggctttcccttgatttcctaactacactccatagagtattacagctctcagtatactacctcatacagagccccatggtgggcagggatcagggataagccatgatactcacctatttctgcaataggctgcttcactccaatctcattgttcacagtcatgactgacaccaggctagtatctggctggatagcagcctctagttcctagggatatgcaggagtaaggtgactagatagtacaaacaaagtcctcctaaatcagaatataggcaaacttagtcatgaaaaggagtcttatactacatacctatctgaatagttaactaaaaacagtgacaacacaaaatgttggtgaggatgcacagactctgaatggttcatacattgttagtgggaatgtaaatatcacagccactttggaaaacagtttgacagtttctgtttctcatcaaactaaacatgaaattaccatagaacccagtaactgtacacttgggcatttatcccagagaaatgaaaattaaattcacaaaacatcttacacaaatgttcacaataactttattcgtaataccaaaaacctagaaactacccagattccttcaacagacgattttcgtacatccataacatggactactacttatcaatcaaaaggaacaaactactggcacacgcagcagtgaatgaattcccaaagacttatgattagtgaaaaaagccaataaaggccgggcgcaatggctcacgcctgtaatcccagcactttgggaggctgaggttggtgggtgtcctgagatcggaagttcgagaccagcctggcgaacaaggagaaaccctgtctctactaaaaatacaaaaattagctgggcctggtggcacacacctgtagccccagccacttcggaggttgaggcaggagaaatgcttaaatccaggttgcagtaagctgagattgcaccactgcaatccagcctgggtgacagagtgagactctgcctcaaaaaaaaaaaaagaaaggccaggtatggtggctcacgcctgtaatcccagcactttgggaggctgaggcaggcggatcgcaaggtcaggagatcaagaccatcctggctaacacagtgaaaccctgtctctactaaaaatacaaaaaattagctgggtgtggtggcaggcaccggtagtcccagctacttgggagactgaggcaggggaatggcgtgaacctgggaggcggagcttgcagtgagcggagatcacaccactgcactccagcctgggcaacagaacaagattccatctcaaaaaacaaaacaaaacaaaacaaaaaaacaaaaacaaaaataaaaaagccaatcccagaaggttacatactgtatgattccatccacatgacagtatgaaatgacaaaattaaagaaactgccagccgggtgtggtggctcacgaatgtaatcccaggactttgggaggcggaggcgggtggatcagaaggtcagaagttcaagaccagcctggccaagatggtgaaaccccgtctctactaaaaatacaaaaattagccgggcgcagtggcaggcacctgtaatcccagctacttgagaggctgaggcaggagaatcgcttgaacccggggggcagaggttgcagtgagctgagatcaagccactgcactccagcctgggcaacagagtgagactccgtctcaaaaaaatttaaaaaaaggccaggcacggtggctcacacctgtaatccaagcactttgggaggctgaggcgggcgtatcacaaagtcaagagatcgagaccatcctggctaacatggtgaaaccttgtctctactaaaaatacaaaacattagccaggcatggtggcacgcgccctgtagtcccaagctactagggaggctgaggcaggagaatcgcttgaacctgggaggcagaggttgcagtgagccgagattgcaccactgcactccatgcactccagcctgggcaacagagtgagactccatctcaaaaaaaaaaaaaaaaaaaaaagaaagaaagaaattgctgggtatggtggctcacacctgggtatggtggctcacgcctgtaatcccagcacttcggcagatcacctgaggtcaggagttcgagaccagcctggccaacatggtgaaagcactgctctactaaaaatacaaaaatacctgggcatggcggcaggtgcctgtaatcccagctactcgggaggctgaggtaggagaattgcttgacctcgggaggcagaggttgcagtgagccaacactgtgccattgcactccagctggggcgaccagagcaaaactctgtctcaaaaataaaataggctgtgtgtggtgactcacgcctgtaatcccagcactttgggaggccgaggcgggcggatcacaaggtcaggagagcgagaccatactgcctaacacagtgaaaccccatctctaaaaatacaaaaaattagccaggcgtggtggcgggcgcctatagttccagctacttggggaaggggctgaggcaggagaatggcgtgaacctgggaggcggaggttgcagtgagcagagatcgcgccactgcactccagcctgggagacagagcaagactccatctcaaataaataaaataaaataaaataaaataaaataaaataaaataaaataaaataaaataagggccgggcatggtggctcacgcctggaatcccagcactttggaaggctgaaataggtggatcatttgaggtcaggagtttggaccagcccagccaacatggtgaaaccctgtctctactaaaaatacaaaaatcagtggagcatggtggcagacacctgtaatccaagctacttaggaggctgaggcaggagaatcatttgaacccaggtggcagaggttgcaatgagccaagttcacaccactgcactccagcctgtgtgacagagcaagactcccatctcaataaaaaataaataaaaaataaataaatatagctggggatggtggctcatacctacaatcctagcactttgggaggctgaggtcagaggacagcttgagccaaggagtttgagaccagccttgcaacatagggagaccctgtctcttttttcttcagatggagtcttgctctgtttcccaaggtggagtgcagtggcggggtctcactcactgcaacctccgcctcccaggttcaagtggttctcctacctcagcctcctgagtagccgagattatgggcagacaccaccacacccggctaatttttgtatttttagtagagacggggttttaccatgttggccaggctagtctcgaactcctgacttcaggtgatccacccaccttggcccccaaagtgctgggattataggcatgagccacagcacctggccaagggagaccctgtctctacaaaaagaaaaaagaaaaaaattagctgggcatcatagcctgcgcctatagttccagctactcaggaaggaggctgaggtgggaggatcatttgagcctaggaggtcaaggctgctgtaagccttggtggttccagagcaagttcctctctcattcataaataaatatatagccaggtgtggtggcacacatctctagttctagctgcttaggatgcataggcacaagaatcgcttgaacttagaaggcggagactgcagtgagccgaggtcatgtcactgcactccagcctgggcaacagagcaagaccatgtctcataaaaaaaaattatatattatatatataaaatattttatatatatatatatagcagccgggcgcagtggctcacgcctgtaatcccagcattttgagaggccgagacaggcggatcacctgaggtcaggcacttgagaccagcctgaccaacatggtgaaaccccatctctactaaaaatacaaaattagccaggtgtggtagcgcatgcctataatcccagctactgaggaggctaagtcaggagaattgcttgaacccgggaggcggaggttgcgatgagctgagatcgcgccactgcactccagcctgggcaacaagagcgaaattcagtacccccccgcaaaaaaaaaaaaaaaagaaacacaggggtaaaactccatgaccttggatttcaaaatgaattctttctttattttttttttgagatggagtcttgcttttgtcacccaggctagagtgcaatggcacgatctcggctcactgcaacctccgcctcctgggttcaagcaattctgctgcctcaccctcccaagtagctgggattacaggcgccctcaaccacacccggctaatttttgtattttttagtagagacggggtttcaccatgttggccaggctggtcttgaacttctgacctcagatgaactggtcacctcggcctccaactcccgacctcaggtgatccgcctcccaaagtgctgggattacagctactcagaaggctgaggcaggaaaatcgcttgaacccgggaggcggaggttgtggtgagcagagagcatgccattgcactccagcctgggcaataagagcgaaactccatctcaaaaaaaaaaaaaaaaaaaagtgcaaatgacaaaagaaaaatacatagctttcttttatgaagtgatgaaaatgtcctggaatatgacagtgatgattgttggaaactgtgaatacattaaaagccagtgaattgtataatttcaaaagatgaatgttatggtatgtgaattacatcagaaatttctaagtgcttaaaaaggcaccatgtaaagaactctgaatatcaggcaaaatgaagttataattcatgtcaaaggaaatgggaaatctctcaagatttttgagtaaagtgagaaaaggccaaataagtactttagaaataaagtctgatgaggatgtgcaggacacactggaaggttgttgctaaaggtgtgggcagcaagccacccaggtgccgaggcaagagaccaagggcacgagctgttccagtataataaaatatataaaataagaatagttatactagatatagatcttagatatgattatatatgaatatcattaatcattagtttgtagtgattactctttattctaatattataataatcctcgctctacaatcataacctaggaaaaaccaggccatacagagataggagctgaggggacatagtgagaagtgaccagaagacaagaggcgagccttctgttatgcgtggacagggccaccagagggctccttggtctagcggtaacgccagcatctgggaagacgccctttgccaagcagaccatggtctagcggtagcgtcagtgtcaaggaaaaacacccactacttagcagaccaggaaagggaatccccctttccccgggggagtttagagaagactctactcctccacctcttgtggagggcctgacatcaggcctgcccgcagttatctggaggcctaaccgtctccctgtgatgctgtgcttcagtggtcacactcctagtctgtcttcatgttccatcctgtacacctggctctgccttttcgttagcagtagcaaattagtgaaagtactaaaagtctctgataagcagaaataatggcgtaagctgtctctctctctctcctctctctctctctctctctctctgccttggctgccaggcagggaagggccccctgtccaatggacacgtgacccacgtgaccttacctatcattagagatggctcacactccttaccctgcccctttgtcttgtatccaataaatatcagcgcaggctggcattcggggccactaccagtctccgtgccttggtggtagtggtcccctgggcccagctgtcttttcttttatctctgtcttgtgtctttatttctacgctctctcgtctctgcacatggggagaaaacccaccgaccctgtggggctggaccctacaaaaggactagttcaggcaacagagattaaagtccagaggcagctaagatgcaggatacaatccaaacaaagaaatgagaggaggccgagaaaggtggctcacatctgtaatcccagtgctttgggaggccaaggtaggaggatcacttgagtccaggagttcaccaccagcctggagaatgtactgagatgttgcctctataaaaaatgtttaaaaatttagcaggctggccaggcacagtggctcacgtctataatctcagcactttgggaggccagggtgggcagatcaccataagtaaggagttagagactagcctggccaacatggtgaaaccctgactctactaataatacaaaaaaattagctgggcgtggtggtggcacatgcctgtaatctcggctacttgagaggctgaggcaggagaatcacttgaacccgggaggcagaggttgcaacgagccaagatcgtgccattgcactccagcctgggtgacaagagtgaaactccatctcaagaaaaaaaaaaaatttagccaggccagctgcagtggctcttgcctataatcccagcactttggggggccaagacgggtggatcatttgaggtcaggagtttgagaccagcctggccaagatgataaaaccctttctctactaaaaatacaaaaaaattatctgggtgtggtggtgtatgcctgtagtccttgctgctcggtaggctaaggtgggagaatcgtttgaacccaggaagcagtggtttcagtgagccaagatcgtgccactgcattccagcctgggagacaaggcaatattccatctcaaaaaacaaaacaaaaataaaaatttagccaggtgaggtgagcccaggagtctgaggccgcagtgagctatgagcccagaagtctgaggccacagtgagctatgaccataccactgcactccagcctggacaactcagcaagaccctgtctccaaaaaaagaaagacagagggagagagagagagagggagggaggaaaagagggagggagggaaaagagggagaaaggaaggaagggaggcagggagggaagaagggaaggtgggagtgagggagggaaaagtataattccagagacattataaggaaatggccatagatataaatgttactgattgatgactgaatgtaaataagatgaaaaagagaggaaataatgaatgatgagaacactttggagtttggattgaggggtccatctacaaacagcatgttaggatttgtctaggaatgctgatatccaaaatctggtggataagattcaagaaaatgacactacttctttagcaggatgagaagcatcagtgcagggaaggaggaggccagagctttgccatggtgaatgtgagtccctggcatcctgcacatgtggccagtggctcccatacaaaccagaaaacaccaacaaatgcaagaaacatgtcctccaggccaggtacagtggctcatgcctgtaatcccagcactctgggagtccgagatgggtggatcacctgaggtcaaaaggtcaagaccagcctgaccaacatggtgaaactctgtctctactaaaaatacaaaaattagagccaggcatggcggctcatgcctgtaatcccagcactttgggaggccgaggcaggtggatcacgaggtcaggagttcgagaccagcctggccaatatggtgaaaccccatctctactaaaaatataaaaaattagccaagtgtggccgggcacggtggctcacgcctgtaatcccagcactttgggaggccgaagtgggtggatcacgaggtcaggagatagagaccatcctggctaacatggtgaaaccccgtctctactaaaatacaaaaaaacactagcaaggcgtggtggtgcatgcctgtaatcccagctacttgggaggccgaggcaggggagtcgcttgaacccgggaggcagaggttgcagtgagccaagatcgcgccactgcactccagcctggcaatacagcgagactctgttttaaaaaaaaaaaaaaaaaaaattagccaggtgtggtggcacgtgcctgtagtcccagctactcaggaggctgaggcaggagaatcacttgaacccgggaggtggaggttgcagtggagtgccactgcactcctgcctaggtgacagaatgagactctgcctcaaaaaaaaaaaaaaaaaaaattaactgggcctggtggcatgcgtctgtaatcccagctactcgggagggtgaggcaggagaatcattagaacccaggaggcggaggttgcagtgagccgagatcgcgccactgcattccagcctgagttataagagccaaactctgtctcaaaataaaaaaaagaagtaacaagtcctccagaggttgcagagagctgagatcaagccactgcactctagcctgggcaaaagagtgagactccatctcaaaaaaaagaaaaagaaacaagtcctccagagaaaaggaggacagtacacactcaaggggaacatgatctcgttctctgccaggcttatttctctaaacttcatcctaactgttagatctattccttcaagctccagctagggcccaagagagaaatttacaagctgaagccaggctcctccatttttgctcctcctgccaatagccactcctacctttaggtcaatgatcccactcttctgcactgggaggtaggtgacctgaaagccctcagcttccagtgaacggcaggagtccaagacacatttgtgttctgtctgggtggtgatcaagtgctttttccgtgacctgtagaatcgggccaccccctagaaattggtggtgacagatggaaggagaacatactcagagagacagcaatgacttcaatctcatttgtaaaggaaaagtgggcaagaacagtatgctccaacaccagttctctcataccaactgagtatcctataattcaattctgaggctaactctccagacttagtgaaaaccccatgggttaagggctcaatcgtacaagactgcccctagttcagataccagacataagtcccaggggtctcaagctacccatacttctgcccagtcaaatacaaattcagggcttcccgaagcccggtcaagttcaataattcactagaataaatcacatttgtccaaacccatagaatgtacaacaccagtgaatcctaatataagctatggactttgggtgataatgatgtatcaatatcaggtcatcaattgcaacaaatgtaccacttgatggaggatgctaataatggcagaaggctgtgcatacctgggggcagggcatatataggaaatttctataccttcctttcaattttgctgtgaacctaaaactgctataaaaaataaaatctattaaaataataatagtatacagattaatgtaggtatttaaaaatctggagaaatatacagcaaattagcagtgaaaatgtgtttagagttctactctatattattggaatttatgattcattcatttaaccaatatttagcacctccagtatcccaagtaattttctaggtgccagtgatataacagtaaacaagtcatgagtaggtattactgttaatatcacaagaaacaataaaggtacatttaaaaattcctggaatttcaactattacaagaaactaaaaaaaacatttatctcattgaagaaaaaaaaaaagcggccaggtgcagtgcctcacgactgtaatccgagcactttgggaggccgaggcaggtggatcatctaaggtcaggagtttgagaccagcctggccaacatggggaaaccccatctctactaaaaattaaaaaataagccaggcccggtggcacgcacctgtaatcccaactactcaggaggctgagggaggggaatcacttgaaatcaggaggcagaggttgcagtgagccaagagtgctattgcactccagcctgggcaacagagcgagactgcatctcaaaaaaaaaaaaaaaaaaaaaaaaaaagaacgccaggtgcagtggctcatgcctgtaatccctccactttgggaggctcaggcaggtggatcacgaggtcaggagtttgagaccagcctgacgaacatggtggaaccccatctctactaaaaatacaaaaatggccaggcgcggtggctcacacctgtaattccaacactttgggaggccgagaagggagggtcacctaaggtcgggagttcaagaccagcctgaccaacatggaaaaactccgtctctactaaaaaaaatacaaaaattagccaggcgtggtagtacatgcctgtaatcccagatactctggaggctgaggcaggagaatcgcttgaacccaggagttggaggctgcagtgagccgaggtcacgccattgcacttcagcctgggcaacaagagcaaaactctgtctcaaaaaataaataaataaataaaaataaaaatacaaaaattagcgaggtgtggtggcacgcacctgtaatcccggctactcaggaggatgaggcaggagaatcgcttgaacctgggaggcagaggttgcagtgagccgagatcatgcccctacactctagcctgggcgacagggtgagactccatctcaaaataaataaataaattaattaattaaaaaaaaaaaagggggctggatgtggtggtggctaatgcctataatcccaccactttgggagactaaggcaggaggatcgcttgagctcaggagttcaagaccagcctgagcaacatcatctatactaaaaaaaaaaaaaaaaaaaaaaaaaaaaaaattagcctggcgtggtggtacacatctgtagtcccagctactcaggaggatcacctgagccaaggaggtcaaggctgcagtgagctgagatctggctactgcactccagcctaggtgagatcaagactctgtctcaaaaaacagaaaaaagaaaaaaaaatgggccaggagcagtggttcacacctgtaatcccagcactttgggagactgaggcaggtggatcacctgaggtcagaagtttgagaccagcctagtcaacatggcgaaaccccgtctctactaaaaatacaaaaattagctgggtgtggtagcaggctcctgtaatcccagctactcaggaagatgaggcaggagaatcgcttgaaccctggaggcagaagttgtagtaagccaagattacggcactgcactccagcctgggtgacacagcaagactcccccttgggaaaaaaaaaaagaattaacagtatcaactttgcagaacaggatcagggactggggtccttggggaaggagaggaagatttacacttcattttattttatttttgtttatttattttttgagacggtctcattctgtcacccaggctggagtgcagtggtgtggtctcggcccactgcaacctctgcctcccgagttcaagcaattctcttgtctcagcctcccgagtagctgggactacagccaccacacccagctaattttttgtattttttagtagagatggtgtttcaccattttgcccaggatggtctcgaactcctgagctcagacaacctgcctgcctcggcctcccaatgtgctaagatcacaggcttgacccactgcacccggcctacacttcattttaaatctttccattggttttaaaaaaacacaccatatgtgacagaattatttttcaaaaattaaaaacttggaaagaaaatgtgcatctctccccagagcttataaaagactattacctttaacagcagaataaaaagccaggtgcagtggctcaagccagtaatcccagaactttgggaggcaaaggcaggaggatcacatgagcccaggagttcaagaccagcctgggcaacataatgagagccgcatctctacaaaaattaaaataacaggccgggcgcggtggttcacacctgtaaaaccagcacttcggttggccaaggcaggcggatcacaaggtcaggagatcgagaccatcttggctaacatggtgaaaccccatctctactaaaaatagaaaaattagccaggcgtggtggtgggagcctgtagtcctacctactcaggaggctgaggcaggagaatggcgtgaacccaggaggcagagcttgcagtgagctgagatcacgccactgcactccagcctgggcgacagagccaggctccatctcaaaaaaaaataaataaataaattaaaataacaaaattagacaggcgtgctagtacacgcctgtaagcctagctacttgggaggctaagatgagaggattgcttgagtccaggagttcaaggctccagtgagctgtgattgtgcaactgcaccccagcctaggtgacagaatgagaccatgtcttttttttttttttttttgagacagagtttcgcccttgttgctacagtgcaatggcgcaatctcggcccactgcaactgcaacctctgcctcctgggttcaactgattctcctgcctcagccttccaagtagctaggactacaggggtgtgccaccacacccaggtagtttttgcatttttagtagagacggggttttaccatgttggtcaggctggtctcgaactcctgatctcagatgatctgccggtctcagcctcccaaagtgctgggattacaggtgtaagccactgggcccggctgagaccctgtcttataaaaaataaacacataaataaaataaaagcagaatattaaaccatataggacaaaattataactatgtaaaaatggtctgttcatgaggacaaagaacataaatgagaaacatttataattgatttatactctattttatcctaaaaagtatttacatcagtaagtaaaaatggttgtggggcactttgggaggccgaggagggcggatcacgaggtcaggagatcgagaccattctggctaacacagtgaaaccctgtctctactaaaaatacaaaaaattagccgggtgtggtggagggcgcctgtagtcccagctactcaggaggctgaggcaggagaatggcgtgaacccaggaggcggagcttgcagtgagtcaagatcgtgccactgcactccagcctggatgacagagtgagactcagtctaaaaaaaaaaaaagaaaaaatggttgtgggatggtgatgatagttcaaaatgttacagttgtttataaaaatttcatttaaatgacatttcaccacccacccaccttattttatctcagttacccatgatgtagatttctttaacaatttatagattattttactctaccaatcatggagattaaaagaaacatcatcacaggtactcttagcgatccttgacctgttggtttggaatctgtggagacttccaaagaaaatattttcgaagttttgaaaatgctctccatttcagaaaccatctccacctttggaggaaccttcaccccgactctctggtctctgcagtcccaaggaaggatgccttcctgttaacatgatcaggcagagtgctgatgaccctgaagcccgtcctaggcctcctatattcaggccaaggtcaaagaaaccaacactggcagcacagttcaaagacaaagatgagagcaagtggagccagagttcaaagtacagcaagccacaatttctcagagccttggcatttactcacataatcctggcaaccaggcccagtgaaatctgactatgttctatgaaacaccaacgtgactactaaaagtaccttttccttgcattagcaccaaagatcttctatgtacccaggacaaaatgactgatcccagaatgggtgaccatgtgaatgcctgcagagggcaccacaaagacaagcacttcaaaatggagatatctaaagaaacaggaggaacttgttgcaaatagatctgatcagaaagaaaaaggaaggctgagaggaggacagccctgaaatcacatatataacttgttgttactagataaaaagaatggagaaaggccgggtacggtggctcacacctgtaatcccagcactttgggaggtcgagatgggaggatcatcaggtcaagagattgagatcatcctggccaatatggtgaaaccccatctctactaaaaatataaaaattagttgggcatggtggcgggcacctgtactcccagctactctggaggctgaggcaggagaatcacttgaacctgggaggtggagtttgcagtgagctgagattgcgccactgcactccagcctggcgacagagtgagactatgtatcaaaaaaaaaaagaagaatggagaaaaggttcaatcaccattatccactctctgaagtaactgccagacaaaaaaaaaacaagtggttaatggcctgagggccacctcctttgctatccaactgcctcactcaactcagaccaacagcagcaaagacttaagaaagagtagactgcaaagggttaaaggaagcaacaaatcagaaagactgcaagccttctcttcacaatggggtggggatggatggctgcgaaatacatatacgagtccaaatgatggagggacactatctcctaggtcaggaaagcccacatacaccctctggttcccttctcttaccttaattgctatgttgttggattcagtagcaccactagtaaaaatgatctcacgaggatcagctccaatcagagatgctacttgctgcaagccaagaaacagagatatataacatcagttccccaggcagaaatagagctgcagacacaggtgggacagccctggagcaagaagagctccactgcattccaccaaattgccctggatgaaggtctgcacctacaagaatcagattctagttatatcccagatcccaggctcttttccagcccaatgcaaaataataactttttttttttaatgaactattggccaggtgtggtgggtcactcctgtaaccccagcactttgggaggccgaggtggaaagatcacctgaggtcaggagttcgagaccaacctggccaacatggtgaaactccatttctactaagaatacaaaaatattaggccgggcatggtggctcaagcctgtaatcccagcactttgggaggctgaggcaggtggatcacctgaggtcgggaattcaagaccagcctgaccaacatggagaaaccccgtctctactaaaaatacaaatttacccgggtgtggtggcgcatgcctgtaatcccagctacttgggaggctgaggtaggagaactgcttgaacccgggaggcagaggttgcagtgagccgagatcgtgccactgcactgcagcctgggtaacaagagcaaaactctgtctcaaataatagtaaataaataaataaataaaaatacaaaaatattagctaggcatggtggcgtgtgcctgtaatcccaattacttgggaggctgaggcagcagaatcacttgaacccgggaggcagaggttgcagtgagccaagatcgtgcgccactgcactccagtctgggcaacaaatgtgaaaactccatctcataaaaaaaaaaaaaaagaactattgagctcttactatttatagtacttcttacttacagatgttgtggtaataaacactttatcagcattgtcttatttaatccacccagtaaccctacagagtagaaactaccacaatctctgttttaaatgaggaaaataaggctcaaagaaattagataacttgcccaagtcatttagccaggaaatatgggaaccaatcaaatgcctgcagtcaaactccaaggctgctctttgaatctcttccagaaagaatccaaaaccatttctacctccatgcacacctaccaagaaagaaatgcctcccacaggccactgcccctctttgaccttagaacctcctagactcctgtgtactaacctgacgagcacgttccatggctgcctcactctcccagccataagcatgtgtccgggagtgtgggttcccatagtagttgattaggtaagggagcatggcatcaagcacccgggggtcctgaacacaacagaacagatcattttccttgagcgcatcgtcaattcaggtcccactccacccctcagacctggccaccctgccttaagacactctcaacccctcaggcactgcctagaggaggcctcaaacattcttttgttcccacaaaactacccaccaaatatcaacctaatacactcccactcacaacccatcccaactcggattgttctgcctcccctcaggtagtctacaaacactgccttgttccgacatctgtttctgctggtgtttccattcctgccaggtaatgtgatctataaggggctgggacaggacagggcctaggcaaacacccctggtcacacattggtgaaaacttgcattagtcttttaacccgtttaatacttgtccaagttcacacagttactaagtggccgttctgctcattccagagcccatgcttttaactaatactatagagcctgcgctgaagtgatctgaccaaggtcaattgctagtgagtagtaaagccaatgccagtggcctcgaatttaagcctcccgactcctcgctcagtgctttttccagcacaccttcacggctctcacttctccagggattcagccatttctttgcgtgatcacgcccatcatttacttcctataagcagccttgggaaaagcttcatccttaccagaggagttgtagcttgcacatccatatagagaggtcgcagcactggccccacctccggggcagcggctgtatctgcgggaaccgcagactgaggagcacggtctccaactgataaaaaatggaacggagtagccaagtaagaccgaaggcaactatgaacgcatggcatccaaagggcagaaggaaaaatctggctggaggtgagataagtgtaagggatgctagggtcgaatctcaatggaaagaaaacaacaccagatacctgacacgctgtaaaaggaggtaagggagagggagagagggttcctggagggggtgttgagttgatattcaaatggtatcgtaggaaggaaggctctaaagggcaaagacgtttagaaggaacgtggagccagagtaggtgcagtcccttctgaccgaaggtaacggtctgcacgggagcccggagcagcatctgtaacttggccaggagcggtctgaaggacgcgcctccacggctctgggggcctgtcgcgcagggtgcgaggggtggtgcgccggggtcaaccgttcggggacccgcctaagaaagtttgagggatgtgtcatttgagagaagggtcagagggtctgggcagcagggtggacaggaaggctccggaatattcagttgcgtcgccgcgcggaggggacaggtccgcgcctcccggagagcgggacccgagcgtaccgcgcaggcgcagcccccgagtgggcgccgcgggcttcggccctggagccgctgtcaccgccactgccgcccgcctccaagcggctcggagcagcatggtcccgctggcagagcccaccttccgaagccgctgcagtcctgggccccaggctcccggaagtgctgcccggcgctccggaagcgattcatcgggccgcgagcgccctccccgtcgttttccgtgagagacgtagagctgagcgacccagcccgcgagcgaggtgaggtaggcgccgggcgacgcggggccggaacgcgaagagggtggtggagtcgggctacccactgattttccttcccttacttcccctgagcccttgggcccacttcccagcctaccgcttccgtccccgcccgactcttgggccagcgcctgggcccacactttcctatcccccgcagatgccggtggccgtgggtccctacggacagtcccagccaagctgcttcgaccgtgtcaaaatgggcttcgtgatgggttgcgccgtgggcatggcggccggggcgctcttcggcaccttttcctgtctcaggtgaggggcgcgggcggtgatctctgggcaggacaaccagaccttccggccctgccccattcggcctggagcctgaacacagcctccttctttcgacttccctctctgtcccctcgcgagccagactcattccaaaccaccttcaatctgtaaagtcaggttggaagcgtcagtgcttaagaatttgagctttagagtcaaaatgctttctggcccttttcttactggttcggtgactttaggcaagttggagactgggtttccttaagtgtagaatgaagacagtagcatctaacttatagagttgtaaaaattcgatcagcacactttgcacagcatctggcacatattaagtgctcagtaactagttactactgttgcttttatttttttttccaattgcgcataaggaaagaaactcgttcagcggttttactattctggatacaggatacagagataaagcagttaaactttacactctaaaggtcattttcacatttagaggctgttattgccatatccctagattgtaaattatcatttacagagcacttactctatgttaagcactgtgctaaatactgtagttttcaaaatcctgtaaataatgttgagatgcccattttacacttgacactatgtgtaaattgtagagctgactcttgaacccccaccttactccaaaatcattaacaccaagaaactaaaagacagatgtctttattgggtcttaaactgcaggcaacaccagtcaaaaaagctggtttctctatgtattttacactgcatctgctgcctcccacaaactgaaggcagttaatacgacatccaccagaaaaataccctggagacccagatggatctttttccttctcattacccaccccaggtagtaagatataatatccagtaagtggaaaatcagatgtaggggttgctagactagtgttagcaaaaaattggaaaggagcagttaatactctttctgatatttttgttaccaaatagctccatcttggtttcctcctcaggatcggaatgcggggtcgagagctgatgggcggcattgggaaaaccatgatgcagagtggcggcacctttggcacattcatggccattgggatgggcatccgatgctaaccatggttgccaactacatctgtcccttcccatcaatcccagcccatgtactaataaaagaaagtctttgagtagtcagtgtccctctcttaaaggaatattcttctctcagcctattatccagctttgccaaggatcttctgcactaaagagatggactaacgtaatgactagggttagtatctctttcacaaggcctgcctctcttaatccaaaattggaaaacttgggagtgtctagtattttccatagatactattcaactaattactcagtacaactctgtgcttgttactacggtcaccattttaaaggagaaaaactacttcaaaaaatggatttataagccgaaatttcctcaaggtcacacattgcattatttccaaagcaatgttcatcctgaggttggttgtttccttggtcgcccaggttggagtgcagtggcacgatctcggcttaccgcaacttctgcctcctgtgttcaagcgtttctcctgcctcagcctcccgagtagctgtgataacaggcacgtgccaccatgcctagctaaattttgtattgttaggctgggcgcggtggcttatgcctgtaatcccagcactttgggaggcaaaggctggtggatcacaaggtcaggagatggagaccatcttgggtaacacggtgacaccccgtctctactaaaaatacaaaaacttaagccgggtgtgttgacacgcgcctgtattcccagctactcgggaggctgaggcaggagaatcgcttgaacccagaaggtggaggttgcagtgagctgagatcgagccattgcactccagcctgggcgacagagcgagactctgtctcaaaacaaaaaaaatttgtattcttagtagagacggggtttcactgtgttggccaggctggtctcaaactcttgacctcatgatccacccgcctccgcctcccagtgttcacatatacaggcataaggcaccacgtccagcccgaggttgttatttagatatacctagtggctttatcagaaaaagcaaaacagttcatccactgtaaaaaaaaatagaaacttctgtagcttctcaactggctaaattccagatgattttctaaccactcatcaacaatctatatagcttgccctccacaaaacttactagtttgatgataaaaagcttctgtaatgaggcagttgtccatctcacctgcccaggccacgcagaccctggagttactaacccgcattgcccattaagcatttcttaaacagaactttcaaagatggtagtaattattataaagataaaagaaaactagatgaacactttggaacactgacaggcaggaggaaattaaggacattaccagattagttacagattttcgaaccagtgggatgctgactcaggaactgattggacataaacagtttcactcagaatgagctgttttctatgcacgacactattcaagttactacactccaaccacatttcctctgaacattatttacacaccaaatttcactctggtagcaactaaattttggcacagatgagattaaccactaaaggccacatttgctggtccagttccctagaaagcaatgacacaacaaatttgttaggaagacttggttcaaggggaaaaactgatagcaggagatactttggaaaaagagcacactgacagagtgtctctgccccaaagaactctgcagtctggtattgaaaagtaaattttcaatgaggctgggcgcggtggctcatgcctgtaatcccggcactttgggaggccaaggcggacagatcacttgaggtcagtgtgagaccagccgggctaacaccgtctctgctaaaaatacaaaaattagctgggcacggtggtgcgcacctgtcccagctcttcaggagactgaggtgggagaattgcttgaacctgggagatggagctgagatcacatcactgcactccagcctgggccaaagagcaagactccatctcaaaaagaaaaagaaattgaaccttgggagtttccatacaaattaaatcactagaacaattattgggataaatgtcaaacaaaacgactgatatgaaattctgaataagcctgtaaaacttgtgcttcaatgctaacaaaaaaaaaagttgaacaaatgaggtaaggaactcagtatttgaagataagctaggagcagcatttcctactcaaaagatttaccaagagataaacagttgaagagaattgagtataaatggtgacagcttgcttcccaactagtatgaaagctcaaaaccccttaatacagtaatatatgcaccttatttaatatattaatatataaatcaattttggaaaccagtttgaagttaagccattttgttaagtatgtattgtaaatggtgaaaatttcttcataaatatgcccagacaatgcaggagaccaagaatgcccaggttttaaggccaggctgtttccttttctttttggtaaacccctcagttttgatacattcttctaaaatacacagggctagactctaatagaataaaggaattcatgggggacaacgtgagggcaagtttccgcagactcggaacattttcccaagaggcaagtactgaattgagactaaaagaagctaattctgttctcaaatttctgtaactttaaaacatttgaaaaatgaagatctcctgtggcctttttaagagacttttatttgagtggttcttacaaagattgttgcaatatgaaagtcatttgtttgatagaaatatcaagctgtcttgtcaaacacactgaagtaacccaaaaatatatttcagagctcacagagcttaaaaagagcaaagattatatgcaaccagacaaaacctatttctgcatttcctatttctttctcagactgctttgcctaccagactctcacgtttaaacatcttcaggaaatgcagggatcattttgtttggaattttaagacacaccagaacacatagtatttacaaagaaacttttacagatacattaattgaaaagataccatcaagaaatataattttgaaatctccctttcttgccaattgatcagaatgcaagatgagatgctaaccaaacagccctttagctgtcttgtatttccatacactaaatgtgtatttcagaaactgctcaaccatcagccaaatatcaacattagtgaaatgtgaaatgtaaccactgtgtaaaaagttaggcttctgaaacattaaaaacattacatccctggtctgcctttttacagaaagcacatttgttctcctagagctattcctatagttcattaattttctacatgaacattttaaaaggcagaacaagagaacagttttgtatacagtgggatttactatttagggagaatgagcacactgcattcctgttaacatttttattttttcaaggtaacaggaaattgcatacaaatgacagtagatccttgcctctttatttttatctaaataaaagataactcaagatgaattctcaagaaagaaaaaaagctatatacataagggactatatcttccttcatcgtctacttggaaccagtagctgtgttgctgtcatagaatcaggaaacaggttgtggtaagttggaagaggtacatatgctgctgttatcattttacctattaaaagaaacagacatgttgggtttagcatcttcattatagagccttaataacaatcagtcaaaaaataaattcaaactcaccagcaaaccacctgccatgcaatgcattgacagcagcaatagctgcagcaattgatgggcacttcacatacacattgccctacagaaaaaatgaaaaaaaaggtaaagatgttgctgtatgcaaaatggacccaagttatgtttattcaagttgcctgtagaaacttagtgctctataaccacaaactggtttaccataatggttccactggctaataggtatactagaattttattaaaaaatgacttctactctcaaatttgccgttttatcttttctctacgatttgtatgcagcctaagaatgaatcaagatgccaagatttcatggcaagctttgagcattactagaaatcctctcataccctgatcaaattgttactgattttcttttattttggagggtttatttagccactatattaaagctactttcaggcacacacacacaaaaactataatggaagacggttaaccataacatgcaccacataatgtgcgaagattaaggtagagacgaacaacctaacatcatttataaaaaaagatgaaaatacctgagctgaatttttgtcaacataaatatgaataactcctccatgtttattacattcttcaatcacatcatccttaatctcggtatcccatccaacttcttcttctctgtaagaaagtattaaggactcttaaatactattgaaactaacaaactatatatttacaaatgtatcaaaaaatttaaatattctatgaattaaaaaaaatactttggaaaaaaagcacattgacagaacgtctctgccccaaagaacactgcagtctggtattgaaaaataaattttcaatgaggccgggcgcggtgactcatgcctgtaatcccagcactttgggaggccgaagtgggcagatcaccagagatcaggagtttgagaccagcctggccatgatggagaaatccggtctctactgaaaatccaaaatttagccacgagtggtggcagatgcctgaaatcccagctattcaagaggctgaagcaggagaatcgcttgagcctaggaggctgaggttgcagtgagccagtatcaaatccctgcatgccagcctaggtaactccgtctcaaaaaaaaaaaaaagttaaaagatacagatagggctctggggaaaatcaaagcaaaataagatagaaaatattgatcccatcctactttatgactctgcataacttgaaagtgacttttaaatagttaaatgggccaggcgcagcagctcatgcctgtaatttcagcactttgggaagctgaggcgggcacatcacttgaggtcaggagttcaagaccagcctggccaacatggcgaaaccccagctctactataaaaatacaaaaatcagccaggcatcatggcacacgcctgtaatcccagcactttcggatgctgaagcgagcagatcacttaaggtcaggagttcgagaccagcctggccaacacggcaaaaccctgtctctactaaaaacacaaaagtagttgggcgtggtggtgtgcacttgtaatcccagctactcgaaaggcatgagaactgcttgaacctgggagatggaggttgcagtgagctaagatagagccggtggcgccactatactccaacctagactgagactctggctccaacaaaaaaagttaaatacttcaatgctatcaaatgatacttacaacgaaagtttatcaccatttcatagataaaactaaagtaaatttggtactgggaaaacaaaagaattcaagactctttggatgaaacagtcatacaattgtcattatatgaaatgtaacttattgaaatcgaaacaaaaatctacattttgattggatgtactatattataaatatgatttataaaaccaatgagaagagttaaaaaatagcattctaatcactagctaggcatagttactagcattctaatgctaatagttattagcatcctaatcactagctaggcatagtttccgcacctggccgaaaaattattttaaaaggatcaaaactatgcagtttcaaatgaaatacggaaataccaggccgggcccggtggctcatgcctgtaatcccagcactttggtaggctaaggtgggcggatcacctcaggtcgggagtttgagaccagcctgaccaacatggtgaaaccccatctctactaaaactacaaaattagccaggtgtggtggcgcatgcctgtaatcccagccactcggaaggctgaggcaggagaatcgcttgaacccaggaggcggaggttgcagtaagccaagatcgcgccattgcactccagcctagacaacaagagcgaaactccatcttaaaaaaaaaaaaaaaaaaaaaaaagagaaatatataaaacaactctattgacgccttgataggaaatatcaagaataaagtccattacttacgtttgagggttaaacatgttagagagttggaaacattgtgttgcaagtggctgaacagaggcagctgcagctaaagctgaagctaaaaaaagaaagagaaaaattagtttcatggaaaatgcatgaaagtatccctcataaatactttaaaacgaaaccaaaaacccaccccaagcatgtaactaggatgtcactggagttattttaccttatttaatattgctactaatgtatgttatcagtagcttttaggtgccagaaaactgaggtaacctaatacttgaaacagacattcagaaatttgggagtcctattttaacagggaaattaaactttatgtgttatcaaaatcagttcaattagacaaaatctcaatacacatcaatccaaacagatgaaggataaaatagatttgagtttatacccaaataagaggggataataaaacaaaatcctttgaaatgccaaataaatctatatcctttcctatttcttcgctttctgcccacgaagttttttaaatctacaaattattaaagaattaagacatataaaatcatccaagtgtttaaagacaatgtcctagaaaaataaatcctattaacaatcctattaaaaataaatcctattaataaatcaaatgttttaaaaatgttttcgcacaataaaagaacactgaaaagagcagcatatatgtgtaatatccactactaccaaaacatactggggtttgaagtttaaagagcattttccaagacagttgctccaatgctttcacgtgatttacaaaaatattaccagtagctgttacagaactcaccgtaatcatattatctgaccaaatttcattccaaaacataataacaaacaaagctaaggataaaacagtgcattagaaattatggtaattaaaataaacgatcacttaaagtatcagaaatattacaccgagaaattagggctgtgcatgaaatatatcataaatgataactttctggtagcattacaggtgctttagcttctctgtaacatataagttttttctttcataaagttttattttaaataaaacaaaattttaatataacatgtcaaattctgctggaaaaaagttaaagattcgagagtgtattataactgtgcaaaaatgaagctcactgtgtagcttacagaagatatggaagtatccttaaaaaaaactagaaagtctaaacagaactgaggaagacttgattcttccagtttctcaagtttagtatgattatatactatgaatactaaaaaatattaagaaaacgtactatacaaacattcacgttcaagctagatcaatgcagaacacagtaaatctaggaaaatcttttaaaaatctcttaacaaaacagcactgattagaagcatcttgtttgtgaaaaaatttaattcttgactgtgatggaacatgacatatctttctcataatcatttccctaaacattaagcatactcctacaaaagatatagaacttacattaacagcaaaatgctcatgtcaagcaacagagatttagtgataactaaaaacaagaaatcatagcctacttaatgaatggtttctctgaaatgtgcatgtaatttaagtatgtataaacctcttattgcttggtactggcttaaataaatcactgagtactatgtcttaagcaaaaaaaggtgagttttatagcatgattcacaactttatactaagacaacttccagattccaggttctaaaatacttgcctactcgttaataagagaatacttcatttcctgacttctatatgcaacttatcaacacttagaacacacaggtaggcataaaacaaaaacaaggttgaaaattttaagcaaactaaagcaaaaaaaaaaattgttattttgattttttttaagtccattaatttgggttaggtcttctgaaatacagacagattactatgaatataccactatgtgtcactgtgtcaaaatttggtccaaattactggtataaaaatatgacaataaatatagaaaactgtcttactacatttaattctatttcaaagacaaaaataaaaaatatgaacacttcaactcaccttcagtctgctgggaaagtcttgtttgcaaatctataacaaaagagaattctacagctcagtgcaggaacaatgaagagcctcaactaacagggtaaatgtcaggaaagcattaataaaagaggactacaatagcagggttcattcaaatgcacttagtaaaacctggcagcaaaacctccttccccattcctcattgagaaggctttggggccttttttccccctcttatcctgggaaacttacttttccctctctcttcctagactagactactcttccacatctcaagtgattttcactacactactatacagctgggaataatgggaaatggggaaagggaagcacaccggtcagaaaatgagtgaaaaaccctgatcttgagaattcaattccaagtacttgggaaatgcaagtatttatatttttagtggccatagtacttaacactttaaaaggatattataaaattgtaaatactgcacatcaaaaagctgtaacagtttccatgatttcccaatttaggaagaacatcaccattgggaaatacaccattccaacagtatgcatatattatttttttaaggacttttcaaagatttaacttgtcaaatctagcccataatggggcaacttgattattgatttcctggcctagtgtaaaaatttagcaaggcagaaataaaaatctctggagttttcttaaaagctatgaagtttaggaaaatgaaaacatctaatcagtattaaaaataagagggatgtgaccaatatattttctcatataatcgttagatttctacagtggacgccatctgaaagctgctacagagtgaaacagtagcaagtctgaacagtaagtctgccacagtgctataatgctctcttgaagttctttttatagaaatatatgacatcaaaattttgattcagtaacctgattttcattaaaatttgattcaactgcaacactttattaccacatatatgggtttcttgcaacatgggcaaaaatgtacagggatctgcagcccaagttatattgggataaaatacctgggtcctaggtgctcaaaattggcatctcagggagctgaagaaatgtaactggtgtatactgaaggaacttgaagataggaccatgtgaacagtgtcaataaactttaaataataacagaatttgtcttttttttcctaaaatgggaaaaaatgtatagatatcagaaatccatgctattttgtctaccaacccaatcataatttcaaaaatgatttgtcatatcatttgtgacaaagtgaaaaataaagcatggttttcataaagataaggactctaacctattttagaaagggcctatcaaactggcagaataaaataatgtggatatagtgatgacccatccctagtttcacccaatagctttaaaagacttaggggacaagcacctcaaacacagtaaacactcaacaattttatttcagcaagttatatgtaatattttaatgaccaccatctggagaaaaatatccagttacacagatattcacctaaaacatgagtgttattaatgcagaagaaatttatagcaaggctaataaaacagaatgatctttaaaatcatctctaccaccaccagcactaaaaaagggaatgtaactagatacatagataaagggtagggacactattgtcaggaatccatatggagctttaggattttagctggctacattcaaacaatcttaatatatactacacgatgagaaagaacccaagaggtacattcatccataataaaagaaataaaggctaacggtagaactgatatttaacagtggataatcttcagttaactgaagacattaagagcaaatcaacgtatctgatacagcatccagggtgtaagaaaattgtctataaatgacccctttgtcactgtatcaattccctgaaggcaggaagaaatctttcaccaccctttagtggaatacctagaacatgaactaaaaattttcttagttgtcaaagaacattatgaacaatgagaagcaatacaggtaaacagttttctggttaaaaaaaaacctttcaaactgtaataataaactctaggtaatgagtttactatcaattagagcaagtagcaatcgacaattactcactgtaaaggatcgaatagctaacactataagctcaaaataaattatgtgttaatccaatggaataaagataacttgaggagggatcaaatgactgttaaatacacaaatgccttactggttctgattcttgtaagtataaactggcttcgctgtcagaaattctagggagtaactgcttgtcaaatttcaaaataagtcatacaatttatagaaaggaaatgaaaccaaatgcaggttttctaaaggtactcacacacttaagaacaaccactaagaaggcaaaacagtgaaaaaataaatgtaaaaacaaaagtcgtcttctactttaattgaatattgagctttcaatttagaagaaaatcatgaagcaaccacaggacctcttcgtactttcagatgtggtactaccagggtctaaaatctatcttctcagttacagtctcacttcgtatatatatataaggtcaaaggaccagccaggtgagggggctcatgcctgtaacccaggattttgggaggtcaaggcaggcaggtctctactaaaaatacaaaaattagctgggtgtggtgggaaatgtctgtgatcccagctatgtgggaggctgaggcaccagaattccttgaacccaggaggaagaggttgagccacagagtgagactccatcccccaccaacaaaataacaaaaggttcttcttatgatgttctaaaagcacgtctttgacatttcaaaattagatcctatcctatctcccagatttgggtcaatgtaaaagttacaggtaattaagaaatgagggccgaacgcagtggctcacatctgtaagcccagcactttgagaggccaaggtgggcagatcacttgaggtaaggtgtttaagactagcctggccaacatggtgaaaccccatctctactaaaaatatccctgctacttgggaggctgaggcacgagaactgcttgaacccaggaggcacaggttgcagtgagccgagactgcaccactgcactccagcctgggcaacagagcaagtctactgttatccaaaaaaaaaaaaaaaaaaaaaaaagggggcggggggttggggggcacaggggaatgagtgttttatgaactaaatccctttatacataattgtaaaaacgtcaattcacccttcttttcctgttgcctccaaaagctccacctcccaattcatgatcttaaatttttatgtactataaagaaaaataactgtctcaacactcttactactacaatagttttaagtaaagcttttttaagtgcctctgatattttctaaattctaatattataaatattttttcgatcaaacaatatacaccttgtagtattcaataaaactgatatatttgaaaataaacttatgtcaatgaatttcgactaaaaactggggtgcagggtttaaaactgtcctgacaactcattttgatgcatggttaattctaccctatgtctccacttccttaaatagaagactacaaactaacaggctataagtacttgatgaattgaattctcagtaagtccttttaaatgtaaaaatttggaaaattttcgaattagatgaaaaaacgatttaaaattagaaaagattcaattcctacctgccacagcaccaaatgccaaagagccactcatctgtagagcttgctgtgctgctggcggaatctgcaaacctgtacctgtaaaagaatagtcttaaagttcctactatgttgagagcagagaaacgaagtttcctgggtcattaatatcatgatcacttcactaaaataaattgcaaggagggccgagtgtggtggttgacgcctgtaacttagctagcactctgggaggccaagggaggtggttcacttaaatcccagagatcgagaccaacctgggcaacaattgtgaaactctcttttttttttgagatggagtatcgctcttgttgcacaggctcttgttgcacaggctggagtgcaatggcgcaatctcggctcactgcaacctccccctcccaagttcaagtgattctcctgcctcagcctcctgagtagctgggattacaggtatgcgccaccatgaccggctaattttttatttttagcagagatagggtttctccgtgctggtcaggctggtctcgaactcctgaacttaggtgatccacccgccacagcctcccaaactgctgggattacagttgtaagctaccgcacccggcagaaaccccatctcttaaaaacaaccaaccaaccaaccaacacaaaaaaaaaaaaaaaaaaaaaaaaaaaaaaaccaccacagaaattagccaggcgtggtggtggttgtttgcaactgttagtcccagctatttagagattagggtgggaggatggcttcagccaaagaggcagaggttgcggtgagccaggatcgcacaactgcactccaaattgggcaacagagccagaccctgcatcaaaaaataagaaattacaaaaagaaaaacttgtaacattataatagctgcaactaaatttattcctaagtatgacatataaacactacataaaggaaaagaaatcttgcaacttatactgtggcattcaaaacacataatatagatttccatacattaatacaaggcacatcatctataaaataatatgcagtgtgaccaaggataacgccaactacaaaataagataaaatctttttccctttcttagtttacatggctacctttcttttccactacaatacccacagtaaatcattcgtaatagcaagaaacacttaccctctgcaagtcttgccattaactgaagacgaccagttgttcccaaatcaattccagtcctttccagttcatcactgtccaaaaatgaactagcactcgaagcatcagtacgttcagtaacatgaccaactttcattggtcttcctgctagttcaaatccattaagttgttccaaagcctttttggcacattctgagtcagaaaactacatgataggggaggcaaggacaggagacagtgctttaatttttaaaatacaaactatacttaaaaatatatttatatttttagcatattcaataattacttctgaatactaaggtagaaactgcaagctgtaagtagcaaacacaacatacatgatgacgacgctagctaacgcaaattaggcttgttgatgtggtagtttaaataaaagatattacaagtaatgacagctttatatttgagaacatggggattgtggttagaaaatgtgaaaactggctgggtgcagtggctcacacctgtaatctcaacacttggagaggccgaggcaggcagaccacctgaggtagaatttagtacttttctaacaaaaatgtgcccagggacaaaatagtcaatataatcctcatatataaaacataaatacttcatacacaagcaaataaatacataacttgatataaattacatatatataaaattttggtttacacatatacccacaatggcttatctggagaaaaagaaaaggtggaaaatatccacactaaagttactagaataaaaaaataaaattggtgagctatgtttcataaattttctcctttcaccagttcattgacgtacgtaacagcctaatgaccagtaagttaaacagatttgctatcaacatagcaacaggcttacattttattgaaatgtagatataagctaacaattttaatttcctgatagagatatacagtgtacttttaaaaatactatgtttccaggaccttaaaaggttacagagctcacacatctgaaaaaagttccaccatggatgagtttcatatacatgagtggcaccatctcggctcattgcaacctctgcctcctaggtttaggcaattcttcctcatcctccctagatgctaggattataggcgcccgccaccacgcccggttaattttttatatttttagtagagacaaggttgcaccatgttggccaggatggtcttgatctcctgacctcaggtgatctaccgctctcagcctcccaaagtgctggcatcacaggcgtgagccaccacacacagcccaaaaacacttttgacaagacaattctggtcttggttgtgaggtatgtacattaaaaaaaggatctttagtaaaaaagaatcgttaacagaccttcatttatttaactgttaagaatgtgtcaaaaggttatcagagatgaacgtataaaacattcaattatatgaatagctggctgacccctatatgtatatatagcacatagtaaaggaaaataggaacacagtaatataatttggatccttgtcccctctaaacctcaggttgaaatgtgatccccactgtggaaagtgtgacttggcaagaggtatgacaaggcagatccctcatgaatggcttggtgcactccccctgctaataggcgagggtccttgctctgttacttcacaggatgtcttcctctctcttcctctccctctctccaagtgacacacctgctcctccaagcaataacaagtaaaggctttgcgaagcacaagtaacagcttcctgaggccaccacagactctgagcagctgttagtgtcatgtttgcatggcctgcagaacctaataaacctattttcttaaattattttatatttatttatttatagttttattttttttcaaggcagagtcttactctgttgcccaggctggagcactgcagcgcaatagcacaatcttggctcactgcaatctccatatcctgggttcaagcaattctcctgcctcagcctcacaagtaggtgggattacagttgagcaccaccatgcttggctaatttttgtatttttactagagacggggtttcgccatgttggccaggctggtctcaaactcctaatctcaggtgatccacccgcctcggcctcccaaagtgctgggattacaggcataagccaccgcgcccggccacaaaaactaatttaaagcacttgaaaatattaaacatgccaccttccccaccattattaactattattgtacttctactatgcaacttggatcaaaaaattttaggagtacctaagtgtgatgatttggttttcacattcatgtgtgagctgtgcctgccttttgttacaagggcatattaccctttgttgtgaaaaaaacttttttgatcggacacagaggctcagtcctgtaatcccagcagtttggaaggctaaggtgggacatcatttaaggccaggagctagagactaatctgagcaacacagcaaatgtagtttaaaaaaaaaaaaaccctaagtaatataattatggtaattacttactgtaataaatccatatcccttggatcgaccagtttcactgtccatcatcagctggatactttcaatctataattgaaaagcataattactataacttaaaagcagagtacaaaactactttcttccctgagacatggttttaaaaatctaccagtctcctcatcctccaaaatagaagacttatcacaaaacctcatcaccaagaagtcttttttaagtctagaaactataattttatatgtaaaatgaaaaaaattaggctgggcgtggtggtcggcgcctgtaatcccagcattttgggaggttgagggaggcggatcacctgaggtcaggagtttgggaccagcctggccaacatgacgaaatcaggtctccaccaaaaatacaaaaattgtctgggcttggtggcgcatgcctgtacgcccagctacttggaatgctgaagcagaagaattgcttgaacccgggaggcagaggttgcaatgaccccagagcacgccactgtactccagcctggacaacagagcgagacttggtctcaaaaaacaaaacaaaaacaaaaaaaaaaaacaaactctagaaacttcccaagcgagaaattatgcactggggagcagaggggagaaaaaaaaactatgattgtaacctaagattaatttttatatcaatactaaaccactgaaaaccagaaatccttcgtaaattaccaatagaaggtagaaacaaaatcaacgtttccttcccattgtgctaaaaacaccaagcagtaatttccaattataccagacagaatcgtaaaaatggaatgaatttggcaatatacaatgaatttggcaataactgcacaattctgtgaattgtactaactaaaaaccattgagtttacgttcaatcagtgaactgtaacacaatctcctgatttagctgtccatttaaaaaaaggtatgaaaaattaaaacagagcatccagccaggtgggttggctcaggtctgtaatccgagcactttgggaggcaggaggatcgcatgttaaggaggtggacgctacacagtgagcttgcatcatgctgttgcactccagcctcagtcacagagggagactctgtctcaaacaagaaaggaactttttttttttttgagacggagtctcgctctgtggcgcaggctggagtgcagtggtgtgatcttggctcactgcgagctctgcctcccgggttcacaccattctcctgcctcagcctcccaagtagctgggactacaggcacccaccaccacgcccagctaaattttttgtatttttagtatagacggggtttcaccgagtttgccaggatggtcttgatctcctgacctcgtgatccacccgcctcggcctcccaaagtgctgggattacaggcatgagccactgcgcccagcccaaggaacgaacttttaatgttaagtatattttaccaaaattttaaaaaagaaacaaagtttatttgctagtatttgctaagccacagaaagtctatggaaggatataaaaaacaaaacaaaacaaaaaaaaaacgggtaagggctgcctctagaaaaggagtagtcgtggatgaagtgggactatgatagggataagatattctaggagcattagctagcaaaaagtaaacaatataaacatttaggctgggctcggtggctcccacctgtaggtgtgagctgacatgggcagactatctgagctcaggagttcgagaccagcctgggcaccacggtgaaaccctgtctctactaaaacacaaaaaagtaggttgggctccgtgactcatgcctgtaatcccaccactttgggaggccgaggagggcgaatcaccagaggtcaggagtttgagaccagcctgaccaacatggagaaaaaccctgtctctactaaaaatacaaaattagcagggtgtggtgccgcatgcctgtaatcccagctacttgggaggctgaggcaggagaatcgcttgaacctgggagatgggggttatggtgagctgagatcatgccattgcactccagcctgggcaacaagagcaatactccatctcaaaaaaaaaaaaaaaaaaaaaaagccaggcatggcggcatgcacctataatcccagctgctagggaagctgtagaagaattgcttgaacctgggaggcagaggttgcagtgagctatcgcactccagcctgggtgacagcgcaggactcagactccaaaaaaaataataaaataaacctttaaaaagggcttcttattaaagctgctacattatgtttactggagttgggcacttaatgcatactaattgttctggggcaaaggtaagcaaactacatataccccatgaaccaactccagcttgacttgttttataaatctttctcctgtctgagcctccagagtaagctggaactacaggcatatgccacccaagaccggctaatttttatatttttagtagagaagaggtttcaccatgctggccagactggtctcgaactcctcacctcaagtgatccacccgactcggcccccaaaagtgcagggatcacaggcatgagccactgtgcctggcccatactcaatttcttaatagcttacagctgtttggaagagagttgagtacttgcaacaagaccatatggcactgaaaacctaaaatgggtctgggcgcagtggctcacgcctgtaatgacaacactttgggacaccgaggcgggtagatcacctgaggtcaagagttcgagaccaacctgaccaacacaccaaaaattagctgggcgttgtggtcagagcctgtaatcccagctactcaggaggctgaggcaggagaatcaattgaacctgggaggcggaggttgcagtgagccgagactgcaccactgcactccagcctaggcgcaaggagtgaaactcccatctcaaaatttaagaaatagtttgacaaatcagactctagagtaataaaaataatttaaatatcaactgtttcctgatgttaatttttatatggtacacagatttctcaaatatccatgattattctttttcttttctttcggagacactctggctctgttatccaggcgtgatctcggctcactgcaatctctgccacccgggttcaagtgactctcctgcctcagcctcttaagtagctgggattagagggatgcgccaccacacccacctaatttttctatttttagtagagacaaggttttaccacgttggccaagctggtctcaaactcctgacctcaagcgatccacttgcctcggcctcccaaacaaagagatgggattacaggtgtgagccactgcacctggccagtgaatatatttttaaaagttaaattttatttgttctatctagctccttttaaatttatgccttttgctaaaattattgagtggaaaaggttcattcctcacagtgacaggacagtcttggcaactttctctcctcaacacagaactagttggacactcttggtttaggtagatagcacaaagtcctctagaacaaaagccaagctgctctgaattgagctcaagaccacaatgccagacacaaggcctcgtggcgcctgtgaagcagatcaagttggttcctcactttgccatgtaacagctcatgtggccccaactgctctgaacttcatttctccatatagcacataatggcatgtcaacctccacctaagatccatgttactgatagaaaagtcaatggaggccaggtccagtggctcacacctgtaatcccagcactttaggaggccgaagcagatcacctgaggtcaggagtatgagaccaacttggccaacatggtaaagccctgtctctaaaaaaaaaaaaaaaaattagtcgagcatgatggcaggcacctgtaaacccaactactcggaaggctaaagcaagagaatcgcttgaacacagagaggaggagtttgcagcgaggcgagattgtgccactgcactccagcctgggcagcagaataagactctgtctcaaaaagtcaatggagaaagtaccagagtggatcagaagtgggtcacatactgttaggcagaacagccttgccagaggggcattcacccactgaagatttcaacagacagaaaaagggcaaatctaatcaggctaccaaggcctggaactgagcacataaccagggagacagagtaatgtctttttaaaggtaagggtctcgccaggccaggctggagtgcagtggtgccatcccagctcactgcaacctctgcctcctatattcaagggagaaattctgctgcctcggcctcccgagtagctgggaacacagagacgcaccaacacgcccagctaatttttgtatttttaacagagacgtggttttaccatgttggccaggatggtcttgatctcataatctgcccacctcggcctccctcccaaaatgctggggttacaggtgtgagccaccgcacccggccaacagaaaagaatcttaagatattcaactttcttttaaaaacaatcttttaaaaaaaatcctactaaaaaataatagtcttcgtatgatttaacaattttccttcttttgacacaggatcacactgttacccaaggtggagtgaagtggcataatcatggctcactgcaaccttgaaatcctgggctaatgtcatcctcctgcctcagcaccccaagtagctgggattacaggcatgagccaccatgcccagccaatgtggactttttattaactctaatacccattatgcatttcacatggcattatgaataacagtaacattcttttaagaatctatcaagtgacctattttaatctatgttgtcacagaaatttttataaaaccagcccttatcctcttaatattaactcacagaaagataacaaagcaagacatacagaaattatgtagttatactcagatcaacaacctactgaagattcattgaagaacctggacttactcttccaaaaggctcaaagatcccacgaagcatatcttcagttatgttgaagtgtaatgagcccacataaagcctcataggtccagcacttcccttttgtaaattgtttgccattgctgcagctctgtttttttctgcctagaagacaaaatacacgtcacacagagataacacacagcagtttaaagacatacaccttccatttgcataacaactaatgttaaagtttagagtgataaaaatactaccctacgtaagtcagatactacatatcaacttaataggaggcatctagaatatgcaaaattcagaaagaggaggtagataacattttaccaagggcctgcaggaaattagggagttacagcttcaagagtacagtttttggctgggcacgatggctcacacctgtaatcccagcactttagtaggctaaagcagccagatcacgacatcaagagatcaagaccatactggctaacacagtgaaacaccatctctaccaaatatagaaaaaattagccgggtgcggtggtgggcacctgtagtcccagctactcaggaggctgaggcaggagaatggcatgaacccaggaggcagagcttgcagtgagacgagatcacaccactgcactccagcctgggtgacagagtgagactcagtctcaaaaaaaataaaaataaaaaaaaaaataaaaataaaaagtttatttagaggcttttttttttttttttttgagacagtctcacactatgttgcccaagctggtcttgaactcctaaacttaagtgatcatccttccttctcatccactagagactgccagggactacagcacaccccacatcataccctgcttattttagaatgttttcagagcacatgccagtcacatataaagtaagcaggctggccgggtgcagtgtctcacgcctgtaatcctagcactttgggaggccgaggcggacggatcacgaggtcaggagatcaagaccatcctggttaacacagtgaaaccccgtctctactaaaaatacaaaaaaattagccgggcgtggtggcaggcacctgtagtctcagctacttgagagactcaggcaggagaatggcgtgaacccaggagacggagcttgcagtgagccaagatcgccccactgcactacagcctgggcgacagagcgagactccgtctcaagagaaaaaaaaaaaaaaaagtaagcaggctacatttcacacctaaaatgaatcatgaacctacattcttgacaacaatcttaagatgcattctgataccacaaatactaaatacagagaaaaatgcttcctggaattgttagacacaaccaacattcactaaaatactcttgagattggtataaccgaacgtagttgtttgtgataaaataaggtgtatatgccataacataaaactgtatcaccaagcaaacattttgagtcagctgtcatccctccataaccaagatcgcctcaaaaaaaaaaaaaaagaaaagttgtccatttgcattctaacacaggcttctcttgtaacaaactagagtacattggatagtactgctctacaacaggttgctgcatgaatttaaaacctcacttaatatgctacttctcagccctgggtcccgccaatgcacacccagccactaagtttgtcttccaacataggaaataatttgagtaactcttttttctttttgagacacagtcttggttcttgtcgcccaggctgcagtgcaatggcgtgatcttgcctcactgcaacctctgcctcctgggtttaagcaattctcctgcctcggcctcctgagtagctgggattacaagtgcctgacaccatgcccagctaatttttgcattttagtagagacaaggtttcaccatgttggccaggctggtctcgaactcctgacctcaggtgatccgcccgcctcaacctcccaaagtgctgggattacaggcatgagccatcgcgcccagccaaaatactaaaatattaaatgctgtcaaagcgctgtgcggctcaagtgatcctaacacttcaggaggcccaggccagaggatcacttgagcatgacagtttgaaaccagcctgagcaacatggcaagaccctgtttcttaaaaaaatttaaaaattagctgggagtggtggcacgcacctgtagacctagctactcaggagactggggagaaaagactgcttgagcccagcaggtcaaggctacagtgagctgtgattatctcactgcactccagccctggcaacagaagtgagaccctatctcaaaaacaaggccaggtgtggtggctcacaactgtaatctcagcactttggaaggctggggcaggtggatcacctgaggtcaggagttcaatactagcctggccaacatgatgaaaccccatctctactaaaaacacaaaaagtagccgaacgtggtggcaggctcctgtaatcccagctactcaggaggctgaggcaggagaatcgcttgaacccaggaggtggaggttgcagtgagcagcgatcatgccattgcactccagcctggtgagagagactccatctcaaaaacaaaacaaaaaaaaggcaaaatcattacatttcaaacacaaggagaaacgacaggacgacagtcttgagaaaactgtatcaatgttaataaacgcaaagttaaaaaaaaaaaaaaagtcctgaaaacatccgactcaacgtaatgagcagcagtcacagaacacaacagcactataccatgcaacaggaggctttcaacaccaccaataatcaaactcttaaccaacaaaaaaattacctgtgatgcctgtactatgattggcacgcctaaaactcgttggccagttaatcctattgctagaggcactgagctaacatcgacgaactccacataagcaattcctttggaacgtcttgaatttctgtcagaaatcatcctcacatctcgaacctagaaagaaaacacagttgtttgtgcaaacatccattgtaacacatgtagaattatttcaagagacactgttgaaggatgaaggtatttttaaaaatttaattaaaaaagtaaatctgtaggacaattcctatatcctatctttatctttgaacaaatttgtagtaacatttatcaactccaatactacaagaggcaaaatggaaacattaccacaaacaaatactgctactaaatcaaatgaagtatttgatgtttacatgttttctcttgcaatttctacctacttgacctccctaaacaggttaagattacctttcctactgtagagaaaaactcttccaaatcccttggtcgaattcttgccgccagctgcatacagaagactgtccttgcatctctttcctcaggagttaaattatcaataggttctctaataggagtaaaacatataaaattaatttcataacagattttaaaataatttttatcttttttatttcttcatatagttcaacaggttttcaggtacaggtgggttttggttacatagatgagttctttaatggtgaattctgagattttagtgtacctgtcacctgagcagtatatactgtaccctcactcctttcccaactccacaacaatatttccatctttagaaaccaggtcttgctatgctgcacaagttggtcttgaactactgatctcaagcaatccttttgccctaaactcccccatagctacggcatttcaccatgttaactaggctggtctcgaactcctgacctcagatgatccgcctgccttggcctcccaaagtggtgggataacaggtgtgagccactacgcctggcctaaaataattctcaaacatgttcagtaaacagagtaagctgtgaaactggtttgtcataattcccaaacccattttcttttttttttttttttttttccagaggaagtcttgttcttgtcccccaggcttggagtgcaacggcgccatcttggctcaccacaacctccgcctccctgagttcaagcaattctgctgcctcagcctcctgagtagctgggactacaggcgcctgccaccacacccagctaatttttgtattttaagtagagatgtggtttcaccatgttggccaggctggtctccaacttttgatctcaggtgatgtgcccgcctcggcctcccaaagtgctgggattacaggcatgaggcaccgcacccggccaacccaagcccattttcagtaagatctattgacaaaaaatgcgcataaaactattcaatgtaactcaattccttctaaaaactaaggtttactgtttcttgtaatcacatcttacatggcattagcacagaagtctactggccttaccatctcaaaaaaagtaatttttcttttctttttttgtttttgagatggagtctcactgtcactcaggctggagtgcagtggcgcaatctcggctcactgcaacctccgcctccagggttcaagcaattcttctgcctcagcctcccgagtagctgggactacaggtgtgtgccaccatgcctggctaattttctgtatttttagtagacatgggattccactgtgttagccaggatggtcttgatctcctgatctcgtgatccacccgcctcggcctccaaaagtactcggattgtaggcgtcagccaccacgcctggcccaaaaagggtaatttttctaaaacaagggtcaaccagaagcctgacagtttaatcatagtcataaaacatatcaccagaccaatcacaaatgccagactgatccaaaatcagtgtaatggatgattctttacaacaaaaccatgtaattgtaaagtcaaattaagtttgacaatcacaaatggcaaacttgaagtgaaaccccaaatgattctacaaattctactttacaaatttagatacagtgtctattaacatcatctctgttacaaaatatcaattaaggttgtaagtcatcctttaagatgtaagcctaaacacgatcttttccattttttggacactctcaggatgtacgggggttggggtggtcgctccacctgtaagatttgtcacaaaagcttttttttctttttggaaacgcagtctagctgtcacccaggctggagtgcagtggtgtgatcttggctcatcacaacctccatctcacgggttcaagcaattctcctgcctctcttcccgagtaactgggattacacgcacgcgccactacatccggctaatttttgtactttattagtagagatggggtttcaccatgttggtcaggctggtctcgatatcctgaccttattgttacaggcatgagccaccacgccaggcacaaaagcttttaaggccgggagtagcgtgcagattgcttggccctggattttcagaccaactgagcaacatggcaaaaccttgtctctacaaaaaaaaaatagaaaaattagcagggcatggtggctgcacctatagtcccagctactcgggaggctaacctgggtgggattgcttatgaccggccattagaaactgcagtgagacatgattgcgtcactgcactatagcctgggtgacaaagagaaaccctacctcaaaaaataaaaaataaaaataaaaaagcaaatgctttctagccgggggtctcaaaaaaaaaaaaaaacacccacaatgctaccacctgacaaaatattccttgaaccgaaatcgtagactgaacaaatacagttccctttttttttgtagacagtcttgctctgtcaccaggctggagagcagtggcgcaatctcagcttactgcaacccttgcctcctgggttcaagtgattctcttgcctcagcatcccaagtagctgggactacaggtgcacaccaccatgcccagctaatttttgtattttttttttttttttgagacagagtttcgctcttgttgcccaggctggagtgcaatggcgcgatctcggctcactgcaacctccgcctcttgggttcaagcgattctcctgcctcagcctcccgagtagctgggatgacaggtgcacaccaccacgcccagctaattttttgtattttttagtacagacagggtttcaccatggccaggctggtcttgaacttctgacctcaggtgatccgcctgcctcggccttccagagtgctgggattacaggcgtgagccaccaccacgcctggcctaatttttgtagttttagtagaggcagggtttcaccatgttagccaggctggtctcgatctcttgaccttgtggatccacccacctcagtctcccaaagtgctgggattacccgcgtgagccaccgggcctggcctacaattcttatttttaagagtaaaataatccatggaaacttcattgaagaacctaggagtaacaattcaaatcactaagacttctgagatgaaatagttttcctcaggacagccaaatagtaaaacttactgttacaactacttctccacgaggctatttcaaataactcattatttattaattccaaagttaagtgtaaagtttgatataactgctacgttgccaacacaaagaaacatttaacacgaataagctaattacccgatttgatcattacactgtatacatgtatcaaaacgtaactgtattacccatatacataatcattacatgtccattaaaaataataaatgcaaaaagtttattttaattaaaataggaaaataagattacattaaaataactttagactgggagtggtggctcctgcctgtaatcccagcactttgggaggctgaggagggcagatcatgagctcaggagttcaagaccagcctgaccaacatggtgaaaccccgtctctacttaaaatacaaaaatttgccgggcattgtggcacatgcctgtactcccagctactcgggaggctgaggcaggagaatcacttgaacccaggaggcagaggttgcagtgagccgagatcccaccactgcactccagcctgggtgacagagcgagactccatctcataaataaataacttttgtggccgggtgtgttggctcacacctgcaatcctaccactttgagaggccaaggtgggtggaccatctgaggtccggagctcaacactaggctagccaacatggtgaaatcccatcgctactaaaataaaaaaatagcgaggcatggtggtgcatgcctgtaatcccagctacttggagggctgaggtagaagaactgcttgaacccaggaggcggaggttgcagtaagccaagactgcactactgcactccatcctgggtgactgagtgagactccgtctcaaaataaataaataaataaataaataaatatataactgttgctttaattatatgaaattaaagtgaaaactactgaaaactcagtagaaattcacttgaccttaaagtactggaagtgcaaaagaaagcaaaagcaagatttaatatggtccaaattactaaatatcatcaaatttaacagtaccataagctgcaaaagctttttaagagctaaaggctttaaagaagtaaactacctcacagggctcttgtcttttctgaatggacttttgcttcgggaacgtcgtctgctgcaaagttaaaaagtttcagaagttatccaaacaagtacagcatgttagttccttgaaaaacaatttaaacaattcagaagtatgtttaaaaaccttaatttgatgctatgaggcaacccaatctttcctcggatggcactgttaaattttggtccggagctaaaaaggaaacacaaaattacactagttacaggtttagggtcttgctaagatcgcattcatgcgctctccagcaagactaacattgtttaggctactgcttttccacctcagttatgaagaggaaacaaaaatacttgtctcttaactttattcccaggcaagctgcccttgtatttatccatcctggaccactgagaggtgccaagaccaaaggttacagcctcaaaatttttagattctgaaaatgcacacacccattttcagactttagatatctttgtaagctacatatatatatacagtcttgagaattaaaaaaaaaaaaacacacacacacatatataaaaaataaatccctctgaacttccctcacaccagcagtaactatggttaacaatttggtgtgtatctttgcagatcctctcttgggaatctatgtgtgtacatgtacatatacaattttcatatacatcttctttttgaaagacttcttttaaaaactaaagtgaattctttagtcatgcaacttaggtatttccccattcaccagtaactcttaagacagcatgacaccacttaacacactacatacttcagttgtttgttgcaaaaatattccatcgtgaacatgtgaaggtaatttaccaattctctagaaaaattttgtgaggacttgtcaggactaacagagtgttttcacaaagatcataaaggtaattattctgtagtaacagtttttgtgactttttaaagaccaggctaacttaaagggactagccagttgtccattagtgctcatcctgctaacttattccagaagaacagcgaaataaataaatacatagtggcctgtgatccacacatttgaattagttttcatgaacaccatgcctacctacaacatgcaagtatttccaaataaaacactttatattaacttgaccctttgcaattcagactaatgctgatgactgagaatcatttactggatgtattacagttctcaagtaattagttataagctattttctttcccctttaattataaaatattctgagttacagcctcaaacccaacattaagaactaagtaattttttattaaagttaagccatgatcccagcaaacaaagtatccatcactcaaaggaattaagctaattcctttccccttatttagttcatcctggtaaaaagatttaacataatcccattttaaaaatgctcagaatcttgataaatgggacaaaagcagagaagttcctaatgttgtacagcattcgaaattaaaatagcattgtggtcccattttcagctattaaaaagttaatgaaataagcagcttggaggaaaccagcatcacggagtttaattctttttattttaaagataaaagagccagaatcggaattcatgtaatgccaaaacatttcatgaatccattaagtcctctgagcactttacattttcttctcattcattactcattaatagcttatctgaaacttattatctccttaaaaggttagaaaacaaatgcttagcttaggggattaagtatcttgcccaagtgattcgggtctgtttgtctttgaattccatccttaaccattcaaatcttagaagttagaagggttatttttaatatatcccagagtttacagcactgtgtttattaagaggaattaacctcataaagcattaaagattgctagatgcaatccttagaattgtaggtggttaatatagttatttaataaccataatatatttgtttccaactttaaatatccacatccaaatttctagtgatctaatcttcaaaacacttttagtttggaataccttttattattattaacaaaccttaaatacagatgagcccaaaaaaggatctttatcaatgagcatacacaacaaattcacaactggcctgacatttcagctgaaaacagccacggtgacagactttttatttactgttaactaattatacatgtgtaacttagtattcatcagaactttacaattttaagtaaatatgtatttagcaaatactgtaacagcccagacacttgttaagctttcttaggtatttgggcactacaatgtcatctttttcaagcactctagtgctttcatccagtttgcgttgactggcatacaatttagaaactctgatagtttaacagaaaatagtcagtatgcctagtaaaagcaaatttttacttatttgtctatgcactgtattttcactttactagtattcaatgccaatatccttaattcaatactttttaaccaatcattaaaaaaataaaaattcacaattcaaatcactcaagttaaactgccatctgaatacccagagaataaccctcaaaccaaaatcataactatagttacatactaaggacttctgtagcggcctctaaatcttcgatctcgacttcttgagcggctccgtcgcctctctttgcttctacttcgctttctttcacggcttttgctctttttcctttctctgtctctacttcgcttccgttccttacttttgcttctctttcgttcatgactacgacttctgctcttgctttttttcctcctgagaagaaaaaaactcgccattatcatgctggcttaagaacccaccaaaatatactaccttttatggccagaatcattttttcatcctttcataaatttctttggctagttttactatgatacaatggtacataatcatacttaaaaaaaaaaaaaaatcctgtaatctcagcactttggtaggccgaggcaggcagatcacaaggtcaggagttcaagaccagtctggccaatgtagtgaaaccccgtccctaataaaaatacaaaaattagccgggcatagtaccgtgcgcctgtagtcccagctactcgggaggctaaggcaggagaattgctcaaacccgggaagcggaggttgcagtgagccaagatcccgccactggtactccagcctgggcgacagagtaagactctgtctaaaaaaattgctacgtatagtaaacaatatcccttttgccttatattaacattactgaaaatcagcagacaagacattatttgaaagacaccatcctctaagagtagaactgcaattatctcctgagagttagctatagctttaacaagcaaaagggcttgttggcaaatacaaatcaaaatgtgaacctttaaatagtttgtcatacaacaggccaacaaaagcattactgtaatccacaaaataaattaataaaacaaacttacaatagaatattttcacattcaagtactagtactggttcatttataaaaattttcatcaaatatagtaatttaccattaagtcaattttgcccccatttacatatggaaatatttaacacgttcaaagggtcacatagacatcaacattttggttttcatgggcaaaaccgtaatgacaaaggacaataagaactaatgcaggccagtgcagtggctcacgcctgtaatcccaaccctttgggaggccgaggcaggcagatcacttgaggtcaggagtttgagaccagcccggccaacacggtgaaatcccctctctaccaaaaatacaaaaattagccaggcctgatggtgcatgccggtaatcacagctacttgggaggctgaagcaagagaattgcttgaacccgggaggtggaggttgcagcaagctgagaccatgccattgcactccagcctgggcaaaaagagcaaaacaccatctcaaaaaaaaaaaaaaaaacccaactccaagtgcggtggctcacacctgtaatctcagcactttgggaggctgaggaaggcaggtcacctgaggtcaggagttcaagaccagcctagtcgacacggtgaaaacccatctctactaaaaaatgcaagaagtagtgggtcgtggtggcacaggcctgtagttccagctactgtggaggctgaggcaggagaatcgcttgaacctgggaggcagaggttggagtgagccgaaatcatgccactgtactccagcctgagcaacagagcaagactgtctccaaaaaaaaagaaaaagaaaaagaactaacgcattaaaatacaatttgacattcctagactttaatgtgaccatttcaaatacttcctaaagttacaatgaatacaccagaaaatggagtatgccatttttaagccagtttatagaaacctgtgggatgcaatcaaaaccaatgatcaacttgaccttcacagacctttttaaaatctctaactaaaaaccaaaaaagccaaacatatctttctgctcacttccgtagtcttcacagtataccacccattcataattaaatcttataatctatacctctgtgtcatcacccaaattttagaggtgccttcagatatttcaatataaattgaaagacatttcaaaatcagtttattccacgaaaatgtctatttgtagtggcttaatgattaaacattttgacaattctgtatcattatctggatatgtaattgtttattccttatcaaagcaaagttacatatcacaagagcaactgaggtctgcctcagagaacctgtaagcaggtcatctttagagtgcattgaaaatagaaaatgaagacacccaccttctggaatcttgaaacccacactccaatcacaaggagatgtagagctttccaaggaggcagaaagtttgtctaaaatttcaagataatccacctgactgtcagaaatgtatatgctaggtagcacatgacagaaaattaggctacactcattatttatatagaactcatcaaagccatgcccagatgggcaataggtaacactccaattttgttgcctaagaaacctaacactatctctgtgacactattccaactatagaactctgagatttctaaaaccaaaagtcctaaatatattcaattagggaacaaggtaaaaagtaactccatccccctcaaaaacaaagtttttgttctgctctagatgggctatagcaagagaggcaaccaacctatttacctctcataggacccaaaacttattctgccaaaagaaaacacttgaaaattggagagctaattttaacttaaggtcttctaggactttttgtaaacaagtcctcacccacatctgaaggcaaccccaggcaggtaaaaagacagcaacatactaagacattcagaaaatacaatcttttgcataaaagcccagagaaaactacaagggtgcaagaaaccagtatatttccagcttcaaagagcatttattacattaactaaagaagggttatcgaaatccacactaatagtcaaatcctgttacaacttaaaagggactttccaaagtctttaatggcagtgaaattttgtactgaacatcactgaagtaaatggtccactgggctgggcctttggactttttggttatatggcctctgcagtaaaggtgttttgctataactggatttgacctcttccatgtaagaagatctaaatttttaatgcaaagtattctggaaaataagaaaaaaaatagaaaagtcatttattccaaaatttatagataatccacaccacagtagccaatatatttcaactgtgtcattttaatgttatcttttattgagtaattctctaaagagcttaacggaatggacgctgatttagactttgcaaaactggttactttaacaaataatattcccatgagggcaagctcaagcacttaggatgcataccttgacatatgcaaaaactcaggtttacagctcttcagaaaataggttgacaaccagtctgtgtcacaataactttgttccttttactattctaggatactatgaagtgtatgttaagaatcagaattatacaattaaaaaaatttatactcagtcaactgtttctcagaacatgccatttttctactacctaacaaactatagctcaatgtggcttttaagacaatgaagttttagaatgaaaaatgcaacacggcactttcctttggttaagaaatttaatttagtactaaaggtttaaagcagagtgttctgtatgttttatatctattcctaaatacaaaaattttcttccaggtaactttaaaattaatttgaaacataaagttccttcagaaaatcaagagtcctgattgaacaagggaatcatttatttatcacctataattgacgagaagtctgactggaaagtattttaagattaccaaagtgttttgaaaggatcttcccttagacaatctcatggttaaagaaaattgtccattctcctatttagtcctgtggttctctacattagacaaaggccaccgaatatcacacatggagaacttgatgctcagcttccttgtaaaagcttgtagccttaatcagcttatacacaggataaaaacaagtagacaccggagatgaccttagtggcaaaaagcgacatgagacaatggtacagtaacgaaggtctgtacccaaaagtgtacgttcttatccttctggcacttgaagcgaaatctttagccactcggcctgacacctaaattggataatttatgtcaatttatatggatacaccttcctgggttttcttttgattagagaattgcaaaacaaaaacattaggaaaccattactgtggcagaaagtctaaaaccagatgacataaaccatacctctggttggttgcatcagatcccacatcaagactaaacccaacctgatccccacaatttcttgtgattggtgaggaactataaatgactcccatccaagcttataccagaaaaaaggagcacattttctacaaattatatcatttttaatccattaccacattattttaggggaactacaaaaaaaaaaaatagtggcttaacaagccctgaataacattatatattttctcatctgttttatgaaattttatcaacctacctaacacagttgtagtgagaaagactgacatacttactatgaagcatttagggatcttaggaggaaaagagccaaaaagaaatcaaataaatggctatttttctctcgtttttcattaacataaggtcgtaagtatgacagatttttatgtttgtttgagacggagtctcgctctgtctccaggctggagtacaatggcataatctcagctcattacaacctctgcctcccaggttcaagcgattctcctgcctcagcctcccgagagtagctgggactacaggcgtgcaccaccacgcccagctaatttttgtatttttagtagagacggggtttcaccatgttggccaggatggtctcgatctcctgaccttgtgatccacccgcctgagcctcccaaagtgctgggattacaggtgtgagccaccacgccaagcccagactttttttttaagacggagtctcagttgggtccatgtctcacgcctgtaatcccagcactttgggaagccaaggcgggcggatcatgaggtcaagagatggagaccatcctggccaacatcgtgaaaccctgtctctactaaaaacacaaaaattggctgggcatgatggctcacgcctgtaatcccagcactttgggaggccaaggcaggtggatcacgaggtcaggagttgaagaccagcctggccaggatggtgaatccccatctctaccaaaagtacaaaaattagccaggtgcggtggcaggcacctgtaatcccagctgctcgggaggctgaggcggaagaatcgcttaagcccgggtggcagaggttgcagtgagccaagactgcgccactgcactccagcctgggcaacagactgaaactccatctcaaaaaaaaaaaaaaaaaaaaattagccaggcgtggtggcaggaacctgtaatcccagctactcgggaggctgaggcaggagaactgcctgaacccaggaggcagaggttgctgtgagctgagatcgtgtcatggcgctccagcctgggtgacaaaaacgaaactctgtctcaaagaaaaaataaagacagaggctgggcacggtggctcacacctgtaatcccagcacttttggaggccaaggcaggcggatcacaaggtcaattctggctaacacaatgaaaccctgtctctactaaaattacaaaaaattagccaggcatggtggcaggcgcctgtagtccctgctacctgggaggctgaggcaggagaatagcatgaacccaggaggcggagcttgcagtgagcagagatcacaccactgcactccagcctgggcaacagagcaagactccgtgtcaaaaaaaaaaaaaaaaaaaaaaaggccaggcgcggtggctcacacctgtaatcccaacactttgggaggccacagcaggaggatcatgagaggtcaggagatggagaccattctggctaacacggtgaaactccctctctactaaaaataaaaaaaaaattagccaggcgtgatggcgcgcgcctgtagtcccagctaatcggaggctgaggcaggggaatcacttgaatctgggaggcagtggttgcagtgagccgtgatagaaccactgcaccccagcctgggcgacactgccagactccatgtcaaagaaaaaaaaaaaaatcaaagaatcacttgaacccaggaggcggaggttgcagtgagcccagactgcgccactgcgctccagcctgggctacagagcaagactccgactcacaagaaaagaaaaaaaaaaagtggatctcatcatatctgttacctaagacttttcgtacactgttttctgtactagtctatagcagagttctattgagtcactcatcttacccaaataaagtgtacagatatattcataatttccaaaatccccaccctgttaagtctagagtttaaaaggcctaagataatgaaagccacctttagaagtacttaagtacctgttccatcacttccaaaagggcctctgagcagcaagttgcagaaataattcacagctttgactccttcggcactttagggcaaacaatactttccatggcctagttatcacctaatttaactctttctaccttttaagatcaatggatatataacagttttatcagtaagataaccaaatatcaaaccaaagttaacaaatttaaaacaagacaacctctaatacagaacttgtcaccagattgtcatgatggacttggaggggaaggtatctgaaactatattctgaaatctaagcaaaaaaatccacagttcctccaagagtttgtctcaaaaggcaaagaaccaattttctaaaagcagcaaagaaaagcttcagaagagaattttgtatactttagccacaggaacacaacttaaggtctaaaaccacaaaaaagctcaccaccctcccccaagccccttcttaaaactcactttttgctacgttcttcatggccgttggcactgctcaacttgttctcatcctaagcagggttgatagaagaacatcatgaggacgaagtggtaacatttcaagttgtcaaagggtaaagggaacaggaataagaaaatacaaaacaattttaaaactaattatttacttatagtttaacatggaaggctataaaaaaatttagatgggtatgtgtttaaccactttgttgcttacatttaagtcatcaagatacaaaaataaaaaaattttccatattaacatgttaaattttactttcttatatagtttagatattaaaagttatccagatttacaatgttgaagtggttaaatataatttccataaaacatgaagtcctgttttgagttttattccatgtgctatggtccctttggtcagtaccatggctctatttctgcctaagccccaagtggccatgctagcagccagccactatcgatttcctgtgaccgatgccattcctgagatcttcgcccatttccgttggagggttgggactgtaagagcttgatgccacctctgtcacacatctcgccctgaagcaaacagggattcacactgctttagtaatgttgactcccaagaacccaagaaagtcaattaataatccaccaagtccagcctaaacatttcctacttccatacctgtttacatggaattacatccatgttaaaaaaaactaagacacaagaatcttaacattaaaacagaaagtagctcttcaagagtctaagcattacaaaattacatacactatttaaatctatcaagaattcatccaaattggtaccacatggtcgtgctatacaatccaaaacaaatgtattatttttaaaaggtttagtgaaatgtttattttaaagtttgattacatcagctataggagtaaagtgctaacttacaaagcttacagtttgtgacaccagtgataatgcatgcatactgctattttcaccaccaactggtgaaacaatgaaaagacagtttacttttactgagataccgaaatgagtcaaagactatattagccaatataattcctttgtttttagtgtgaaatactatggtagggcctaattaaaaataaaaacaatatggagaacagtaaaacagtcatcaagtgactctaagcttgtatttactctaagcttgtattaagcttgtattgactctactgcctcttgtattttttttttttaatttctattcagggatccaagaattttagtaattattaactgagcagcagattgccactggactgttttaagatttactatcaccagtcttacatagatacataaattttaaaatctcacccatttcttcttataagactgttagaagatttaacttgccacagactggtcatgctttgttattcttggacccctgctttttcccaaaccactacattcacctttttgctataccaaactggaggtggtaattcttagttgagtcattttacctaggggaccacggtacagcgataagtcactcaattactaccttatgattgacagttcacactggaatcaaaggtgaattcatgggagtagaggtgagatatcgttaggcaagtctacaaagagagatagatgggcatttattcatcacgctgaagtgaaactactgcacaatattattacatcaatagcatatatttacttttgtaagttacacgtaatgcatctctgataagataaatcaagagggctccggggaggttagtttacatttcagcagtagtttcgtgaataatgctaaattaagaaatatataaacctcaccgacatgttttttctcaccttcttgtaaggagcctcaagcattgcttcaatatcaatatcgtctgccattttctctaaacgcctaggaagagaacaagacaatttcttgagtaaacatttctcttacaatgtgaaacaagtttcactcttgttgcctatatcgtctaacattttctctaaacgcctaggaaaagaacaagacgattccgtgagtaaacatttttctttttttttttttttttttttgagacggagtttcgctctagttgcccaggctgaagtgcagtagcgcgatctcggctcactgcaagctccgcctcccaggttccagcgatcctaccacctcacctcccgaatagctgggatcacaggcgcctgccaccacgcccggctaatttttgtatttttggtagagacggggtttcaccatgttgatgaggttggtctcgaactcctaacctcaagtgatccgcctgcctctgcctcccaaactgctgggattacaggcgtgagccaccgcgcccggcctggtaaacgtttttcaaatcgactgaatttttcttctcagccgacacactcgaaaacttaagaaaaacctccaaaagccctacaattaatgactaaagtgacatgcactttaaccaggtttggcttacgtaagtaaatccaaaacgcctcttacacgaaacacacgaaaatgaagacttcaatatccaatatttaaaactctgctgtcaactccaaaaacagaaactgggagacccgaacgagagcgcctctttccgggcaaaaacccgcgctgccattttaggggcaaagagaaactccctccattgggaggggttatgagccaaggcagcgttcaactggcgccatgttgggaggtcgcggccggcccaggcctcgaaggagacaggtcaccattctaccgcggcctctcgggggtccctaccgccccaagaatccagactatacccgactggaaaataagggcgcggtcactgaaacagggccgatttctcgaaaaccaccccccaccccggtcgctaaagacctccaaaagcgcccctcagcccaaaatggagccaaacctcgagaaagctgagataatacgcgggtccgcaacgccccgtacctgttccggccttcgggcgcctgtggtgctcgtgttcgggaagagattgctgctgctgctgctgctgctgccgccgccgccgcttctgttgctactgttaagcccctaggcccaggccgcggaaccgcccagcccgaatatcgggttccaaggacggctaggcccgagagaatctaaaaaaaacaatggaattagagaagcccacgcgggagagcaggacggcggcttcggcagctcaggatccacccctgcgacagcgtcgacaagctccctgaaatggcggccgctgcttccctgtactcacattcaccagcacacatacacacacacaaacacacggggcctcacagagccctcagcacgggctctcgcgagaagctgccccaagctccaaatttgagcggccgaagtatcgcgagacctaagtatggctccggcgaccgtagcccaatctcgcgcaatgattgcgccacagatattcccatcccccattcagtgaggcgcctttcactccccctccgcgtaagcacccaaatctcgcgagacagagcgggtctctagggcaaagacagttggtaggctgcctgtcaatctttcagagagctcttcgctgagtggagctcagcggtcacctccccctcgtggcgcctcctcacggccatctgaagattcctccggcacagccgatcgcccccgctccggcctcccacacagatggctgtcaaggtcgccataaggcaacctagtccttatggcgataggataaaacggccatattcagattatccgctgagggtggagaggaagtggaaaagtgtatcagaaggccagaagaagagatctttaggggtagggggagagggggagataataaaaatagatttccctgtcatttggagccaatggcgcggcctccactgtcgagctttgaaacaaccttggaaatagtggagaaaagcaaaaaaaaggtggaaaaaataaactcttgcttcccttggcatgggatcagttttgtgccccgaatttaatcagctcttgtgtcagggttgctaccgttccttcaaaaatgttccccttcctgaatattactggacgatttggtgaaaaaataagacacccccccaacaaaaaaaaaaaggcccccttccccctgggacctggctcctctcccctgaagtcttctagatgccaggtaattagagtatgaattagccatttgttctttggtcagtactgtgtgaggtttcctcctagatgctgggaaaaaaaactggaaagaagtcttcaaagcaaaaatcttaccctctaatcttaacagtctaatgattgagggcagaaaagattggaaatgagacgccttgattagtgtaactagctgctgcaacactgtgtgaccttggacaagcaaattaacctctcagaggggatctttcatttcctgatttaaaagaggacgtacttagtagctagtctaagctacttgagactgaggaaggcaggtaatgctcagtactgaatttttagaggttagcagggcatgtctgcccaagtggaccctcagtaaattaatgaatgaaggctcagaagggctatagtgaagattaaatgatataatgtctgtaaaacgcctggtaaatatttgatcttcaaaacagctaacttctgtttctgctaaacaaaattatttagagcaaatatagatgttaagtggttttgcctctcaggttaactttacacacaggttaggatttatcttagaggattattaataacagttattttgtagttagaatactcccttaatcctttttctgaaaattcagatcctctttttattttatttctgagacagtctcgctctggaggctgggcgcagtggctcatgcatctaatcccagcactttgggaggccgacgcgggtggaccgcctgaggtcaggagttcaagacctgaccaacatggcgaaaccctgtctctactaaaaataaaaaaaaaactaggtggcaggcgcctgcaattcccagctactcgggaggctgaggcaggagaatcacttgaacctgggaggcagaggttgcagtgagctgagatcatgccattgcactccagcctgggtgacagagatcgagactccatctcaaaaaaaaaagaaagaaaaagaaagaaaagaaaactgtcacaggaaattgaagcataatatgtcagaaataaagcaagctaacctttgctatctcttcctgcccctcggtaattccagtattatgactagtgcaaaatgaaagcatgaagatggcacttggtttttcttgtttgtttaggaacatgacatgacagaatttgaccttaaccgctagacttcttgtttgggaagaggaaggatttaagctctaagtcgcttgatgatttaaggtcccttaaatagttttctgctcaaggaccatcagaggcaatatggcaacttagcagatcatcaagaaaagccgtttggaaaaatcaagtttctgaaacaagtattttttatgtttaaaagaaaatatccccaggcatggcggctcatggcctgttatcccagcactttgagaggccaaggcaggaggattgcttgagtccaggagtttgagaccagcctggacaatatagcaagaccctgtctctacaaaaaatttaaaattagccagacgtggtgatgcatgtctgtagttccaactactcaggaggctgagatgggaggatagcttgggcccaggacttcaagactgcagtcagctagaatcacgtgccacttcaccccagcctgggctgcagagcaagaccctgtctcttaacacaaaagaaaatatcacgaacataagatgcttctcattcactttacaaaacttcactaactctggttcatgaactttctatgtaaattaattcccctttcatcattttgctttcaaaagatggaggaatagagcttgaaatagagccaaaaaggtaatgaatatacttagagaatttggctgaaaactaaatgtattttaccaatgtggatttttaattttttaattattaagggtacattttaaatgtatatgtttatcagatacatgtggtttggttttgttttgttttttgtccccaacaatctacagcaagtagaattgtttcgttttttaattgagacagggtctcacactgtcccacaggctgaagtgcagtggcaacatcatagattactgtaaccttgcattcctgggctcaagcaatcctcccagctcagcctcccaattagctagaaaaacaagtgcacatcaccatgcccagcttaattttttaaaaattttttgggctgggtgtgatgacttactcctataatcccagcactttgggaggccgagataggtggatcacctgagattgagggtttgcaaccaggctgaccaacataaagaaaccccgtctctactaaaaatacaaaattagccaggcgtggtggcgcatgcctgtaatcccatctatttgggaggctggggcaggagaatcacttgaacctgagaggcggaggttgcagtgagccgagatcacgccattgcactccagcctgggcaacaagagcgaaactctttctcaaaaaaaaaatttttttttgtagagatttgggcttcaaatgtgatgttttgataaaggcatattatgtgtaataatcaaatcagagtaattggggtaatccatcacctcaagcatttaacatttcttttctttttttttttttttgagacagagtttcactcttgttgcccaggctggagtgcaatggcgcgttcttggctcacgctctctctctctctctatatatatatatgtgtgtgtgtgtgtgtgtgcatgtgtgtatatatatgtatatatatatatttttttttttttcgagatggagtctcgctctgtcgcccaagttggagtgcaatggcacaatctcagctcactgcaacctccgcctcccaggttcaagcaattctcctgcgtcagcctcccaagtagctgggattacaggagcatgccaccacacccggctaattttttgtatttttggtagagatggggtttcatcatgttacccaggctggtctcgaactcctgacctcaagggaattgcctgcctcggcctcccaaagtgctgggattataggcgtgagccacctcgcccggcctttttctttcttgaaacagtgtcactttgtcacccatgctagagtacagcggcaaaatcacagcttactgcagccttgacctcctgagctcaagagatcctcccatctcagcctcccaagtagctgggactacaagcacatgccaccaggcccaggtaattttagtattttttgtagagttgggtttttgccatgttgtccaggctggtccccaactcctggctcaagggatcctctcctctatgcctccttaagtgctgggattacaggcgtgagccagcatgcctgaccctttttttttccccatatcactaggacaatgggaaacttaagcccatttcatatagatgtaattaattttaacactcatgtgacctttgcctgatttaggcagatgaaattgtatctccccacccaggttccttctgcacttgattatctcatcaatctactgactgattgaattgttttaaatacttgcctgtctattggcacaatgtcaagggtattctagtgacatatccaaaggttttaacttaaatttgtgaatcatgttttttgagacagtcttgcaccatctcccaggctgcttggagtgcagagacttagttatggtttacatggtttactgcaggctcaaactcttggcttagcttcccgaagtgaatcattaggttttttttttttttttttgagatggagtctcgctctgttgcccaggctggagtgctgtagcgcaaccttggctcactgcaacctccgcctcctgggttcaagcgattctcctgcctcagcctcctaagtagctgggattacgggcacctgccaccatgcctggctaatttttttgtagagatggggtttcaccatgttggccaggctgtttttgaattcctgatctcaggtgatccacccaccttggcctccgaaagtgctgggattacaggcatgagccaacatgcccggcctgttgcttgttttttttgagacggatactcactcaatccacccaagctggagtggagtgcagtggcttgatctcagcttacttcagtctccttctcccaggttcaagtgattctcctgccttagcctcccaaagcagcgggaccataggtatgcgccaccactcccggctaatatttgtatttttagtagagacggggtttcaccatgttgaccaggctgatcttgaactcctgacctcaggtgatccgcccactttggcctcccaaagtgctggtattacaggcgtgagccaccacacccagcttggttttttgtttttttgaaatagtctcactctgttgcccacgctgcagtgcagtggcaagatctcagctcacagcaacctccacctcctggattcaagcaattctcatgtctcagcctcctgagtagctgggatttcgaccaagtgggcccaggtaatttttgtattgttagtgcatatggggttttgccatgtcgacccagctggtctcaaactcctggcctcaagtgatcagccctccttggcctcctaaagtgctgggattacaggtgtgagtcgccgtgcctggcagaatgattagtttttaagaagaaatctaggccgggcgtggtggctcaaacctgtaatcccagcactttgggaggccaaggtgggcagatcacctgaggtcaggagtttgagaccagcctgaccaacatgatgaaatcccgtctctactaaaaatacaaaaaattagcagggtgtggtggcgggcgcctgtcatcccagcttctcgggaggctgaggcaggagaatcacttgaacccgggagttggaggttgcagtgagccgagattgcgccattgcactccagctcgggcgacagtgggagactgtctcaaaaaaaaaagaagaaatctttcaagggtacatccctggccacttacttgaggttgataccacattaactttgcttgggatcactgtcaaaaatcctgtcctcaaactcaagataatttcgttagatccgatgtgaactagatagggaaataactgatgctttctgtcagagtttcatctttggtcaaaaaagtaaaatgttttgaactcatcatagttacggcaatgaaaaaaattaaggggcactcataatagcccatgtgtccattccatggccaaaaggattgcccaaaatgctactttagattaaaaataaaagcaaaaagattcaatacacggtaacataaaatgtaatttacggccgggcgcggtggctcacgcctgtaatcccagcactttgggaggccgagatgggcggataacaaggtcaggagatcgagaccatcctggctaacacagtgaaaccttgtctctaccaaaaattcaaaaaaattagccaggcatggtggcgagtgcctgtagtcccagctacttgggaggctgagacaggagaatggcgtgaacccgggacgtggagcttgcaatgagccgaggtcatgccactgcactccagcctgggtgacagagcaagaccctgtctcaaaaaaaaaaaaaatgtaatttacaacactcatttagagcttatcagtgaaatatactgtttactgattcattcagtgtttatttagtacattaggtaggtgaaatactcattaagacaatttgtggccaggtgccgtggctgatgcctgcattcccaggactttggaaggctgaggcaggtggatcatgaggtcaggcgttggagactagcctggccaacatagtgaaaacctatctctactaaaaatacaaaaaattacctgggcgtgctggcgggcacctgtaatcccagctatttaggaggctgaatcccttgaacctgggaggcagaggttgcagtgagccgagatcgcatcactgcactccagtccaggcgatggtgcgagactccaattcaaaaaaacaaaagaaaaaaaaaagaaaatttgcgagcccacagctaatcaaaaggataatcctttttccttcaagggtttccagtttattgagaacacctgaaggaatgtaaaaccatattcaagatactgttttgcattgtactaataagattttgcataaactcaatgctttaaacatcaaaagtcagggtctcggccaggcacggtggctcacacctataatgccaccactttgggaggccaaggcagaggatcacttgaacccaggagtttgagaccaccctggtcatcatagcaagaccctgtctgagaaaaaagatggagtctggcagtgtcgcccagcaggcattgtttggtggcatgatcatagttcattgcagcctcaaacacctgggctcaagagatcatcccacctcaacctaccaagtagctaggactacaggcacacgccactacacctggctattttttttctttcatagagacaggatctctctgtgttgcccagcctggtcttgaattcctggtctgaagcaatcatcccacctcagcctcccaaaatgccgggattataggtgtgagccacctaacctggctaatagtattaataatagcatatttacataacacttcacacattataaacctttttctatataaaaatcccatttattcctctatatcagtttatttcctttttttttttttttttttttttgagccagagttttgctcttttgcccaggctggagggcagtggtgcgatcttcactcactgcaacctcctgggttcaagggattctcctgcctcagcctcccaaatagctgggattacaggtgcatgccaccatgcctggctaatttttgtatttttagtagagacggggtttcaccatgttggccaggctggtctcgaactcctggcctcaggtgatccgcctgcctcggcctctcaaagtgctgggattacaggcgtgagccaccgctcccagccttgtttatttccttgaatgaaatacattgaaatgatcagactataatggaagtgatcacagaatctgcttctgaaagtagctgatttatgtattttatcagagcagttagggagatttttttccaacattttattatgaatattctcaaacagaggttgagagaatagtacagatgcccaccatctattttacgtttaacatttttcaatgtttgctatatcacatattcatctatccctttgtccatccattcatccaacctaatttctgtgtgcttttcaaagcaaattgcagacatcagtatactttatttctaaacacttcagcattgcataatcttaactagagttttttttttaatcttaactagagtttaatagtgttcacaatatttttaaatgacataatatttacatatggcaaaacacacaaatcttaaatgtaccaatagattagttctgacaaatgcttacaaatcgggtaatgttctgttaactttattaagtaaagaaatagcagacacaggcacagagggtcagagaaagcagtatattttgtcccaaaatatcctgatttgacaaccggagaaatggataaaccattgcaaattaggaggcagagtattgtttaaaaacatctgctaacagaagcaaaaataatgcagtcgggcacagcattgcaaaagatttaggaattaagcaaatctagcaatagagaggaagattctgctgacaaggcatcacatgatggagatataccttgaaaatgaaggatggcaaacaaaagaagcatcaactcaatagtggttttgaatgaaaggcatgtgatttcatgatatgaatgaatgaccttgtacaatgaatagcccagaaagacacagcatctctgaaaggatgtagctaataaactcattcttttggggtctgaaaaaaataggttcttaacagtcattttctgtaagaggtctacagacatacatcttgcccaaacatctctaaataaccagctccctagcctacctaggtggcaggaacctgtaatctcagctactcaggaggctgaggtgggaggacttcttgagccccggaattcatgtacagcctgggaaacacagtgagactccatctctaaaataagtgaaataaataaccagatgccatctcaatatataaatgaaacatcagagttggaatatgtgcatcatagacatgaattgtatgctattgttgtaaaggagcaagggatgccgggcgcagtggctcaagcctgtaatcccaacactttgagaggctgaggtggggggatcacgaggtcaggagttcaagaccagcctgaccaacatggtgaaaccccatctctactaaaaatacaaaaattagccaggcgaggttgtgtgcacctgtaatcccagctactcgggaggctgaggcaggagaactgcttgaacccaggaggaggaggttgcagtgggtggagattgcgccactgcactctagtctgggcaacagagtgagactccatctcaaaacaaacaaacaaacacaaaaaaccaacatgggattttggtaagaatgtggagaaattggaacccttatagtttattggtatcaatgtttacatattaatgatatagctgctatagagaacagtttggcagttactcaaaaagttaaacatggagttactctatgacccagcaaatacattcctaggcataacaaaataatttagaacagacatttggctgggcacagtggttcatacctgtaatcccagcactttgggaggctaaggcgggcagatcacttgaaaggagttcgagaccagcctgatcaacaaggtgaaaccctgtctctaccaaaaatacaaaaattagccaggcatggtagcgtctataatcccagctacttcggaggctgaggtgggaggatcacttgaacctaggaggtggaggttgcagtgagccaagatcacaccactgcactccagcctgggagacagagcaagactccatctcaaaacaaaaaaacagacagtcaaataattactcatacacaagtgttcatagccgcactgctcaccatagccaaaaaatgaaaacaacccaaatgcctaccaactgatgaatggataaacaaaatgtagtatattcagacaatggaatattattccgccataaaaacgaaatactgatacatgctataatgtagatgaaccttgaaaacactatgctaagtgaaagaagccagacacaaaaggtcacgtattgcttgaaaccatttatatgaaacatccagagtagataaatccatagagtcagaaatcagattggtaggccgggtgcagtggctcactcctgtaatcccagcactctggggggctgaggtgggcagatcaggaggtcaggagatcaagaccatcctggttaacacggtgaaaccccatctctactaaaaatacaaaaaattagtcgggcgtggtggcaggtgcctataatcctagctactcaggaggctgaggtaggagaatctcttgaacccgggaggcagaggttgcagtgagccgacatagcaccactgcactccagcctgggtgacagagagagactccgtctcaaaaaaaaaaaaaagaaaccagattggtctttgccaggagctggagggaaggaggaatgtggggtgactacttaatggctataaggtttcctgttggggtaataagaatttaccagaactagatccacctagttaagagttccaggtagtggtagcgatagatgctctggatcgagttgtaaagcccaaaatgaaaagagtcaagagattccttgagaagagagaaccaaaactcaatgaaaatattaaaaatgcaatgctgattaaagggggaaatgcaaacgcaacagtgacacaagtacttaaagatgtgtgtgcactgaaaaaaccatacggtgtactgtataaaaagaaaaatgttacaagaccttttgaggatcagacatcactggaattactttcaaagaagtcagattgttctttattcatgtttggctcctataataagaagcggccaaataatctagtaataggtcatatgtatgactaccatgtgctggatatgattgaattaggtattgagaattttgtctctctaaaagacattaagaacagtaaatgtcctgagggaacaaaacccatgctaatatttgctggtgatgatttcaatgtaacagaagattacagaagactaaaaagtcttcttactgatttcttcagaggccccacagtatcaaatatctgcctggctggattagaatatgttctgcacttcactgcactgaatgggaagatttactttcgaagatataagttgctgttgaagaaatctggttgcagaacaccacggattgaattggaagagataggaccctcattgaatctggttctgaggaggacacacctggcatccgatgacctttatacattatctatgaaaatgccaaaagctctcaagccaaagaagaagaaaaatatctccaatgatacttttggtacaacttatggaaggattcatatgtagaacgaagataagcaaactacaaaccaggaaaatgaaggggttgaagaagtgacctgcagaaaggataacagaagaccaggagaaaaagtcaaaaagaatttaaaagaaattatggaaaaaaaaaaaaagaatttaccagaactagacattggagaaggttgcacaacattgtggatgtaaatgccaagaattgaacactttaatatgattaatggttaattttattttatgtgaatcttatctcaataaaaagagaatagactgggtgcagtggttcatgcctgtaatcccaatactttgggaggccaagggggaggatggcttgaaattaggagttctcaaggccagcctgagcaacagagaggaaccctatctttttttacttgttgttgttgttgtggttttgagacaagggtcttgctctgtcacccaggctagattgcagtggcctggtatgattgatctcactgcaactctgcctcctgggtataagcaatcctcccaggtgtggctgggatgacaggtgtatgccaccatgcccagctaatcttcatgtcttttttggtagagatagggtttttctgtgttgccaaggctggtttcaaactcttgggctcaaacaatctgcctaccttggctgcctaaagtgctaggattacaggggtaagctacctctcctggccttgaccctatcttaaaacaaaaacaaaaacaaaaacaaaaaaacctagcagggcatggtgacatgcacctgtagtcccagctacatgggaggacgaagtgggaggattgctggaacccaaaagtttgaggtggcagtcagctatgatggcactgctgcatttcaccctgggcagcagattaagaccctgtctcctaaggaaaaaaaaaaaagaaagatattttaaaaaaaggaaagaaacaagggaccttctcagaacctctagaatcaagagcgagatgctggatgatcaatgaaatgaaaaccctcagccaggcgcaatagctcacgcctgtcatccaaacactttgggaggcagaggtgggcagatcatgaggtcaggagtttgagaccagcctggccagtatggtgaaaccccgtctctactaaaaatacaaaaattaggtgtggtggcgcgtgcctgtagtcccagctactcgggaggctgagacaggagaatcccttgaaccctggaggcagaggttgcagtgagccaagatcgtgccactgtactccagcctgagtgacagagcaagactgcatctcaaagaaaaaaaaaaaaacccacacacaaaaaaaccaaaagagactcaaatccctgctttcttcttcttcttctttttttttttttttgagacagagtcttgctctgtcgcccaggctggagtacagtggcgcgatctcggctcactgcaacccccgcctcctgggctcaagccgttcttctgcctcagcagcccgagtagctaggattacaggcacgagtcaccacgtccagctaattgttttctatttttagtagagacgggtttcaccatgttggccaggctggtcttgaactcctgacctcaagtgatccgcccacctcagcctcccaaagtgctgggattacaggcatgagccactgtgcccacccaaatccctgctttcaaatacccacctcttctcatgtcatggctacattctgcacttgcagaatattgaagtaattccatatatatatatatatatatatatatatatatatatatacacacacatatatatgtatatacatatacatgaatatacatatacatgaatatatgtatatacatatacatgaatatacatatacatgaatatatgtatatttacgcatatatattatatatatttactacatatgtattttatatatatacatatatatatattttttaattgagacggagtctcaatctgtcgcccaggctggagtgcagtggtgcaatctgggctcactgcaacctctgcctcctgggttcaagcaattctctgcttcagcctcctgagtagctgagattacaagcccccaccaccacgcccagctaatttttttgtatttttagtagaaatgggtttcaccatcttggccaggctggtcttcaacgcctgaccttgtgatccacccgccttggcctcccaaagtgctgggattacaggcatgagcccccatgcccagccatatattctatatgtatatgtgtggcagtctactatgtgccagtcactaaactaggcactggtaaaacaaacaatggagtgcaaaaaacagtcatggcccctgccctcctggagctaacaaaccttcttggaagaggcaggcattgatcaaaagactatatgaatagggctaagcacagtggctcaggcctgtaatcccaacactttggaaggatgagccaggtggatcacctgaggtcaggagttcaagaccagcctggccaacatggcaaaaccctgtctccactaaaaatacaaaaaaattagctgagcatggtgacacatatctatattcccagctactcaggaagctgaggaaggagaatcccttgaatccaggtggtggaggttgcagtgagctgagatcatgccactgcactccagcctcgtagacagagcgagactcaaaaaaaaaagaaaaaaaaagactatataaataaatgaagatgcacaactgtgacaattgctataagagacatttatggtgctataagagcaaataagaggaagatttgggccaagctcggtggctcacaccggtaatcccagcaccttgggaggctgagatgggctgatctcaaaaaaaaaaaaaaaaaaacaaaaaaaaaaaagtaagatttgaggagcagcgtataacaggtaaagaatattcctggcaaataatagactgtgcaatagccttgcagcagaatgaagcatggtgtctttaaggactacaggaagaccatgtggctatagcaaagatgcttaggaagagcccaaccatgtaataccttctaagccagggaaggtgagtctggtttgttgttgttgtggttgtttagatggagtcttgctctgtcaccctggctggagtgcagtggttagatctcgactcactgcaacctttgccccccgggttcaagcgattcttttgcctcagcccctccagtagctgggattacaggtacacaccaccacacccggctaatttttgtatttttagtagaaacgggtttttactatgttggtcaggctggtctcgaactcctgacctcgtgatccccccgcctcagcctcccaaagtgttgggattacaggcgtaagccacacgcctggcctaatttttatttttatagacatggggcctcactttgttgcccagcctgatcttgaactcgtgggcacaagcaatcctcccaccttggcctcccaaagtgctgattacagatatgaacctccatgcccagcagttttttcaacacttacagaactagtctcattgcctcttcttcagagataccagcacctggctgcccaatgccccatactcacaagtctggtttctaccccttggggttcttcctctgagttcagagacacgagcacctgtcaatcaatacctcctcctcagaggtctgagtgtcggctgtgtttggccactccccctctaaatttctatgttttaataactccaacctcttccttttgttccctcagccctaggggtggtagctgttcctacagttactaccaccatgaaactttaggtttcgccttttacttcttcagttacttagttaacaatccactaagttacactgtctctgtccaaatgccatgtgatttctacctccttacaggaccttgactaatatataaggattgttatttatccttcaaggtccagttcaagtgctgccttctaatgtgtcttttccattatcctcagttaaaattatccatccagttaattcataatgtctttcttgaaaagccaataggcgtttgtttttataattatatgcccagtcacactcatatgcctactcacatctctttgttgtcctacagttatactgaaacttctttactcaaattaactctgatccaaaaaaattgcctaccaattataatagagaagagtaggtatagagcaagaaggaacaaacatgggttctaatccattcaattacataatgtaattctgcacagtttacttaaactctcagttaaatttgtttctctagcctcacagacggctctgaggattaagtagaataaatgtggaaaggattaagtaagataatatgtgtgaagcatttaccacagtgcctgtctaatgccccaagtattcaataaatataaactattggccgggcgcggtggctcatgcctgtaatcccagcattttgggaggccaaggcgggtggatcacaaagtcaggcattccagaacagcctggccaacatggtgaaacccgtctctactaaaaatacaaaaattagccgggcatggaagcaggcacctgtaatctcagctactcgggaggctgaggcaggagaattgcttgaacttgggaggaggaagttgcagtgagccaagatcgttgccactgcactccagcctgggcgacagagcaagactccatctcaaaacaaaacaaaacaaaacaaaaagagttatgctgagtcttctctgcctatgttctataaatggaacaataaagcctggatgacagcacatctgtttacaacatagtttattgaatatttcaagcccactgttgagacgtactactcagaaaaaaaaaaaaaaaaaaagattcctttcaaactattactgctcattgacaatgcacctggtcacccaaaagctctcagggagatatacaaggagatatacaagatatacatgcctgctaaaacaacattcattctgcagtccatgaatgaaggaataatttggacttccatgtctttatctttatttttaaaaaatgtttatttttatttctatttatttatttatttatttatttatttttgagacagaatctcacactgtcgcccaggctagagttcagtggctcgatctcgctcactgcaacctccgcctcctgggttcaagcgattctcctgtcttggcctcctgagtagctgggattacaggcgctcaccactacgcccagctgatttttgtatttctttagtagagatggaaattcactgtgttggtcaggctgatctcgaactcctgtcttcaagtgatctgcctacctcagcctcaataaagtgctgggattacaggcgtgagtcactatacctggcctttattttttattcctcagcgatttttatatagagatcaggtcccactatgttgtttaggctggtctggaacacctgggctcaagcaattctcctgctttagcctcccaaaatgtaagccaccatgccaagcctgactttcaaatcttattgtttaagaaatacctggccgggatacctggccggggccagacctggtggatcacgcctgtaatcccagcactttgggaggcagaggcaggtgaatcacctgagatcaggagttcaagaccaggctggccaacatggtaaaacaacgtctctactaaaaatacaaaaattagctgggcatggtggtgggcacctgtaatcctagctactcagtaggctgaggcagaagaattgtttgcacttgggagaaggaggttgcagtgagccaagatcgtgccattgcactccagcctgggcgacaagagcaaaattccgtcaaaaaaaaaaaaaaaagaaggaaggaagaaagatagatagatagatctggctgggtgtggtgcctcacacctgtaatcccagcactttgagaggctgaggtgggtggatcacctgaggtcaggagtttgagatcaacctggccaatatggtgaaacctcgtctctactaaaaacagaaaaataggggctgggcggggtggctcacgcttgtaatcccagcgctttggaaggccaaggcaggcagatcacaagttcaggagtccgagaccagcctgtgcaacatggtgaaaccccttctctactaagaataatttaaaaaaaaatagccaggcgtggtggcgcatgcctgtaatcccagctactcaggagactgaggcaggagaatcacttgaacccagggggcggaggttgcagtgagccgaggtcacaccactgcactccagcctgggcaacaagagtgaaactctgtctcaaaacaacaacaacaaaaagacactctacattttcttatatttatttagttccttacttagttattttgagacagtctggctctgtcacccagtggaatgcagtggcacaatcatggctcactgtaacctcaaactcctggactcaagcaattctctcacctcagcttcccaagtagttgggactacaggcacttgccatcacacctggctacttcataaagtttttttgtttgttttttgaggcagagtcttgttctgttgctcaagctggagtgtactggcatgatcttggctcactgcaaactctggatcctgggttcaagtgattctcctgctttagcctcccgagtagctgggattacaggtgtgcgccaccatgcccagctgattttttttgtattcttttagtagagatggggtttcaccatgttggccaggctggtctcgaacccctgaccacctgccttagcctcccaaagtgctggaattacaggcatgaaacactgtgcccagcccaacaatatattttatacaatggaataaatataaggtccttattattttgttttatgttactgctgcatagtattccttgtgtggacatattataatttgcttaatcagtcccctattgatggccatgtgggtgacttccaattttctgcctataagctcagcactttgggaagccaaggctagaggatcacttgagcccaggaattcaagaccagcctgtgcaacatggtgagaccctgtctctacaaaaaaatttaaaaggccaggtgtggtggctcatgcctataatcccagcactttgggaggctgaggcagacagatcactagagcccagcagttcaagaccagcctgggcaacatggtgaaactctctgtctacaaaaataatacaaaacttagccggatgaggtggctcacacctgtagtcccagctacttgggaggcttagatgggaggatctcttgaacccaggagatggaggttgcagtgagccaatatcacaccacagcactccagtctgagcaacaaagcaaggctccatctcaaaaaatacatcaataaataaaatttttaaataataaaaataatttaaaaattaaagttagccaggcataatggcatgcatctgtagttccagccacttgggaggctgaggtgggaggatcacttggtcaggaaaggtcgaggctgcagtgagttatgatcgtgccactgcactccagccagggctaaaaagccagactttgtctcttaaataaatatataaaataaaaagagaagttttggaaattatcgtgatgatcttgtgtgggaaatattctgaacacacaaaaaggacaagacattaaagaaaatattataaattcaagtacataaaatatttatattttattcatggatatacatatacacatgggtagtctcagaagcgttagggaattgagacagaatggaagctaaagaagagtaacaggtcaggtgtggtggctcacacctgtaattccagcatgttggggggccaaggccagcgaatcaggaggtcaggagatctagaccatcctgggctaacgcagtgaaaccccatctctactaaaaatacaaaaaattaggccgggcgcagtggctcacgcctgtaatcccagcactttgggaggccgaggcaggcagatcatgaggtcaagagatctagaccatcctggccgatatggtgaaaccctgtgcctatacaaaaattagctgtgcattgtggcgcttgcctgtagtcccagctactcaggaggctgagacagaagggaggcggaggttgcagtgagccaagattacgccactgcactccagcctggtgaaagagcgagactccgtttaaaaaaaaaaaaaaatttagccaggcgtggtggcacgtgcctgtattcccagctaccggggaggctgaggcaggacgccagtgcactccagcctgggcaacagagcaagactctgtctcaaagaaaaaaagaaaaaagaagaagaataacaaagaggagccattcatttactttgttttcaatgtttatatgtttataaacaatgttgcaataaataatttccctactgatagtcaatcacaacttttccattgttataaaccatgcttcaataaacatccttttatattcaaaaaacaagacaaaaaccaaaaagaaaggaaaaagtggggctgtgtctggcttagtgggaattgggtgccaagaaacaaaagcatgattgagtgttatctgtgtaattatgtgcatttgaggttaaaaaaaaggaggacagtagaaatgttgataattgctgggcgcgatgtaatcccagcactttgggaggccaaggcgggtggatcaccagaggtccggagtttgagaccagcttggccaacatggagaagccctgtctctagtaaaaatataaaattagctgggcatggtggcgcatacctataatcccagctatttgggattctcttgggattaaggagaatcgctcaaactcgggagttggaggttgcggtgagctgagatcacgccactgcactccagcctaggcaacaagagcaaaactctatctccaaaaaaaaaaaaaaagaaggaaaagaaatgttgataattaatgctctgccacccggacctctgcgaatcccttcttgtctgcttactgactcaccaagaccctaaggctctctctcccttcactgtcaccctacacttacagatttgaaatcttgcttccttcatttcaccctccccagcctagtgcatacttcccttgggcctaaaaaggtatctgaagtccaatctgaattccaaattccacactctaaatagcaccactaaagaaagtcactggaggaacaattatggaaaaacaggcactgacaggtactctcacgccttgttccattttccctgctttccttgactatgtcattgtcctatcccctcgccccaacccacgactacttcacaagcaccaaactcttttcagcctttattctttttttttttttttttttttttggggacagagtcttgccctgtcgctcaggctggagtgcaatggcgacatctcagctcactgcaacctccgcctcccgggttcaagcagaggctcctgccttagcctcccgagtagctgggattacaggcgcgcaccaccaccaccacacccggctaattttttgtaactttagtagagatgcggtttcaccatgttggccaagctggtctggaactcctgtccttgtgatccacctgccttcgcctcccaaagtgctgggattagagccatgagccactgcgtccagccttcaccctttattattttcagagttatttatcctacaagctacatcattgcccctcctcctcttccctatctcctttcattttcaggggagcctatttattagaggaagtaaactgaaggcagaaatcttcaaatacctggctaaaataaaaattattttttttagccgggtgcggtggctcacacctgtaatcccagcactttgggatgctgaggcaggcagatcacctgaggtcaggagtccagactagcctggccaacatggtgaaaccccacctctactaaaaatacaaaaattagccaggtgtggtagtgcatgcttgtaatcccagttactccggaggctgaggcaggagaatcgcatgagcccaggagacggaggttgcagtgagccaagactgcaccattgcactccagcctgggcaacagagtaagaatccgtctcaaaaataaataaattaattaattaaaaaaaataaaattgtatttaaaaaactccaaaacccttctttttttttttttttttttttttttttttttttttttttttgggatggagtctctcactctgtcgccaggctggagtgcagtggcatgatctcagctcactgcaacctccacctcctgggttcaagcgtttctcctgcctcagcctcccgagagtagctgagactacagtcacacaccaccacgcccagctaatttttgtatttttagtagagacggggtttcaccatgttggccaggatggtcttgatctcttgacattgtgatccgcccgcctcggcctcccaaagtgctgggattacaggcgtgagccaccatgcccagccaacatttcttaaaaaaaataaaagccacaatctgggtgcagtggctcatgcctgtaattccagcactttgggaggccgaggcagttggatcacctgaggtcaggagttcaagaccagcctgaccagcgtagaaaaaccctatctctactaaaaatacaaaaccagcctggcatggtggcacatgcctgtaatcccagctactctggaggctgaggcaggggaatcgccttgggaggtggaagttgtggtgagccaaggtcataccattgcactccagcctgggcaacaagagagaaactatgtctcaaaaaaataaaataaaataaaataaaataattaaaaaattagccaggtgttgtagcgggtgcctataatcccagctactttggaggctgaggcaggagaatcacttgaaccagggacgcgcagtttgcagtgagctgaggtcatgccgttgcactccagtttgggcaaaaagagcaaaatttaatctcaaaaaaaaatatcctttcatcatgtcctttcacagattagctcttatctgccctttttttttttttttttttttttttgagacagagtctcactctgtcgcccaggctggggtgcagtgacatgatctccgctcactgcctcagttcctgcctcagcctcctgagtacctgggattacaggcatgcaccaccacaccaggctaatatttgtacttttagtagacacacggtttcaccatgttagccaggctggtctcaaactcctgacatcatgattcgtctacctcagtctcccaaaatgctgggattacaggcgtgagccactatgcctggccacgcccagctaatttttgtattttagtagatatatggtttcaccatgttggcccagctggtctcaagctcctgacctcaatgatccacccaccttggcctcccaaagtgctgggattacaggtgtcagccaccctgccagcctcttatctgccattctaatggaatctgctcaactctctaccccacccatgcaactcactttcatacagaattcctgtatgcatgaaaacatgcccagccaggcacggtggctcattgctgtaattccagctctttgttaggctgaggccgacagatggcttgaaaccagcctggccaacatggtgaaaccctgactctactaaaaatatgaaaattagccaggtgtggtggtgcatacctgtaatcccagctactcaagaggctgaggcatgagaattgcttgaaccctggaggcagaggttgtggcaagccgagatgtcaccactgtactccagcctgggtgacagagtgagacaatgtcttaaaaaaataaaaaaattagggctgggtgcagtggctcatgctttaaatcccagtgctttgggaggctgaggccggcagatcatgaggtcaggagtttgagactagtctggccaacatgatgaaacgccatctctactaaaaatacaaaaaaaattagctgggcatggtggcaggcacctgcaatcccagttactcaggacgctgaggaaaaagaattgcttgaacctgggaggcagaggttgctgtgagctgatacctcgccactgcactccagcctgggcaacagagtgagactctgtctcaagaataaaataaaataaaataaaataaaataaaataaaataaaataaataaataaaaaaacaaaatgcttggctggatgtggtggttcacacctgtaatcccagcactttgggaggccaaggcaggagaattgcttgagcccaggagtctgagatcagtctgggccacatagcgagaccccgtctctatgttaaaaaaaaaaaataggaaaaaagaaaaaaaagcatgcccctgtctatattttattttcaccgagtaatgtgctctatttctggaaatactttcatccttccttcctctggctctccactgatgcatctccaaagcaactccaatcaattcaacaaatagttgttaaacaaccagcacattctaggcaggatgctaggagctggggggatcgagataaacaagaagcagtcctgttcccagagaagttcacaatctgatggtaaaagcaaatacaattatgtaagaaaataaatcaaattaggccaggtgtaatggctcacgcctgtaatcccagcgctttgggaggctgaggtgggcagatcatgaggtcaggagatcgagatcatcctggctaaaatacaaaatactaaaaatacaaaaattagcccggcatagtggtggacacctgtaatcccagttacttgggaggctgcgcaggaggataacgaggtcaggagatcaagaccatcttggctacgtaggagaatcgatagaacctggaaggcagaggttgcagtgaactgagattgctccactgcactccagcctgggtgagaagaacaaaactccatctcaaaaaaaaaaagaaaaaaaaatttcggctgggcgcagtggctcatgtctgtaattccagcactttgggaggctgaggcaggaggatcatgaggtcaggagatcgagaccatcttggctaacatggtgaaaccccgtctctactaaaaatacaaaaattagctgggcatggtggtgggcgcctgtactcccagctacttgggaggctgaggcaggagaatggcgtgaacctgggaggcggagcttgcagtgagccaagatcaccccactgcactccagcctgggcgacagagtgagactctgtctctaaaaaaaacaagttttgtttaatgaaaaaagtaaggtgaacaacaacatgaataaatgttccttttgtgttaaaggatcaatataagaactgtatcaaagtttgcttatatatatgtaaagaaatactgatggtgtgcacctgtagtcccagctacttgggaggctgaggtgggaggactgcttgagcccaggagtttgaagctgcagtaagctgtgatcgtggcgctgcactccagcctgggcaacagagcaagatcctgacacaaacgattcattaaaaaagtaagtgtcatgtttaccaattggaactggaccaatgagggacaagaatttcagggagactttgtattgtacaacgtttatgtaatttccagtatttgaaccatgtgacaacattaactgtttaaaattaaattacaagaagtttggagactgaagtggattacctggatattccaagactgtttgtttaatttacctctttataacctccattctcttagtccctgaggcgaaaatcctccccgtttccctttatctctaggctcgtaagaattttaacccacaagaaatatttattaggtatgtttaaattacaggtaacagtgactggagtgcaatggtgtgatcccagctcactgcaacttctgccttctgggttcaagcgattctgccgcctcagcctcccgagtcgctgggattacaggatgcgccacgacgcctggcaaatttttgtattttagtagagatggggtttcaccgtgttggccaggctggtctccaactcctgccctcaggtgatgtgccggccttggccgcccaaagtgctgagattacaggagtgagccaccaagcctggccccccctccttttttttttttttttgagacagagtctggctctgtcgcccaggctagagtgcagtggcatgatgatcttggttcactgcaacctctgcctcccgggttcaagcaattctcctgcctcagcctccccagtagctgggattacaggcatgtaccaccacgcccagctaatttttgtattttagtagagatggggtttcaccattttggccaggctggtctcgaactcctgacttcaagtgattcgcctgccttggcctctcagagtgttaggattacaggcgtgagcttctgtgcctggccttatcagcctttttagtgactaggacaagaatacaaaatgctttcctttccttccgactgctccctccctccttgtaatcatgcaaaatgcaggaagtaatttggaattcctagttaattctcctccccctcacttggagagcagtgaaggcctggggagttcgggaactttccgtggagcccagactggagagacgtccggccagggccaagacaacctgcttcccttgggcctctggtgccttgttgaggtcttggacctttcagatgctactgtgactgtggtttccggcttcctgagttctcacactcagcttggtgctgcagagatcacaccccagttcctgcttttggggactgacatgctcaagtttggtgatactcagtacatggggtctgtgagatctagagggcttacttttctgttttagtttccctcttttcccttaacagactcactgtaagtgctttagggttgcataaggatagagtatagaggtttgctgggtagacattgagaaagatcagtttcctaattgaatattttatctcatgttggatctttaattctgcttctctttagctaggaatattttgaatatgctgaatctagtaaaaaagaaattagaaatgaagttgtatagaactttgtagttcagtacattttctcacatattattgaacttaaacgtgacaattctgcgttggtagatatatattatcccattgagtaaaaaaagtgaatattgaagaaaagcaatgcctacagagagtgacaactcttccatgcaggtagatgctttttgtgctatcctatactttgtatggatgcacacagggtttcattgtggagctctcagcttatgggctgggactacagttttgaaatacagtattagtaagatgctggggaggatcttaaggcagaaggtagatgttacttctggtctaaagtcagtggactttagaccaaaatcttgtaaactggagctctctggctagcattccattaatattcagttcagaagaagctggtaagtcaaatttctgcaagtttttacatcagaaagagcttagctcacaaggtacttttttctcatctgtattcagttatttttccctgatcagtgtcagtctccttccaaccctcacttcccatcttggggagtacccttaggggcaggtcattcctctcttctttccctggcaggctggactcatccatgtgacctgagattggccaatcgacagtggctgctggccaagaccttgcctcttgagtgagtgactcaaagacaaagggatactaagattgaatcacagcagtggtgcgcagtgttgctgggggcagcagctgttgttgctctttcttggtggagctgtccttgtgcctgtttgttttccaagcctgcactcctgttgtagctcaggggcccttgtaacatatttctcttttgcttgccatgattacttcaccagtctgtgagctcctcgagagcagggcctaagtctcattgtgctctgagtgtttggtgcccatcttgaatttgactctcggtaaatgcaggttgaataagtaaagaaacatgctatatttatacggggctacagagtctggagttcttggcattattgtggttggggggcaaaaagttctttgtgtgctaccatagccactgacatctgagcaatttcatattaataaacataaacccagaggatcttgggaaggcccttcctatatgtgagcacttacttgactgagtggcactgattctcaaattgctgattttttaaaaagtatgaaatgtatcatgaatttgcatgcttatccttatgcaggggtcatgtgaatcttttctgtattgttacaattttattttattttattattattttttgagatggaatcttgctctatcacccaggctagagtgcagtggtgctatctcggctcactgcaacctctgcctccagggttcaagtcattctcctgcctcagcctctcaagtagctgggactacaggcatgcaccaccacacctggctaatttttgcatttttagtagagagagggtttcaccatgttggccaggctggtctcgaactcctcacctcaggtaatctgcccgtcttggcctcccaaagtgctgggattacatgcgtgagccaccgcgcccagccatgttacaattttaatagaatacatgtactgcccaagcaagtgtagctgaagcttttgtccctggttccacagtgtctctacctaagggctgctctttgccctgactacctcaactgaggcaataccctccttagtttccagccctggtttaaaaagcacccctcaggctggatttgctggctgaggcctgtaattccagcatttctggaggctgaggcaggaggatcacttgagccaaggagtttgagaccagcctggtcaacaaagtgagaccctgtctctaaaaaaaaaaaaaaaaaaactcggccgggcacggtggctcacgcttgtaatcgcagtattttaggaggccgaggcgcgcggatcatgaggtcaggagttcaagaccagcctggccaagatggtgaaaacccgtctctactaaaaaaaatataaaaaattagctgggcgtggcggcgtgcgcctgtaatcccagctacttgggaggctgaggcaaagaattgcttgaacccgggaggcagaggttgcagtgagccaagatcgcaccactgcactcccgtctgggctacagagcgagactctatctcaaaaaaaaaaaaaaaaagtggccaagtacggtgttaattccagcactctgggaggctgaggtgggtggactgcttgagcccaggaattcaagaccagcctgggcaacatcgtgaaactgcgtctctacaaaaaaatgcaaaaattagccaggtgcacacctgtggttccagctatctgggagactgaggtgggagaattgcttgggcctaggaggtggaggttatgaggagccgagactgcgccactgcactccagcctgggtgacacagtgagaccgtgtctcaaaaaaaaaaaaaaattagctaggcatggtggcatgggcctgcagtcccagctactcagaaggttgagctgggaccacaggtgcgcacgttcacgcctggctaattgttgtatttcttggagagacgggggtctagctatgttgcccaggctggtctcgaactcctgagctcaagtgatctacccacctcagcctctcatagtgttgggattacaggcgtgagccactgctcctggtctcatattcttttggggtggcttcaactccgaccttcgtccccagagaaaatacagctccttatccttagcagcaattggaaacctttctaggagttaatgataaagtgggggagaaatgagtgcaaaggctctgagatgagaagaacctggattgttagcggagttgaaggacactgagaatgtgggggagctggattcgtgaggataagaaagcagcaggtcaggtccagactttgaagagcctggtagatagtctaggtgaagagttagatcttaatccggagtagggagggaaacgagctttgagcaggggatggcgttttgaaaagacctctctgccggtgtacgaagaatggattagaacggcgaagagtaatagggtggaaaccatcttcatcttggagagagatggtggtcgcttcgatggagaaatgggaagctttgagacgcatttaggtggcaaaattaacgggtgatggatagcgtccattccccggcttcggtgatctcagtgattacgagtgagtggggacttcgtgttcctgctagggcgcgggcctgtttcccgcgcgtcagggtagtgggcgtggcctgcgcaggccgttgccacagtgatcgggcagacggggcagggggcggggcagctgggaccttacgtcactcggtggtggcgatgatgcgtgtgtgtggggggcggggcatacgctgggcgcgtcccgggggtcacgtggtgcagagcacgcagagtccttctgtcggttggtcctggagcggcgcagccggagtggggccgtgaggtgagctcgcggccaggcgaagccggccggccgggccgggttgggccgggcccgcgctgcgcgcgcgccgtgcgggcggggacggcgacggacgccaccgctgcttcggtcccctgcccggccccgctccccgcctggccccgctcgcccagcctggagggaggccctgggactgctgctgagagcgtggcgggcgtgcgagcggtgcccaatccccggggctacccgcaagagtggcggcggctgccgccaatcagcgccgcccgagggggctgggccgtggggtgcgggcccggggcgcggagcgggccgtgttgggggtgcgggtaagccctagggcccgagcctgagctgtgtgggcacctagagcctcatcagcagcctctgctattgccttgcgctttgggaatatgttttttaaaattggctttttttatcctattctggggagcacattcctttctcaagaccccaaatatgggagtgtcccttttctctatagttttgaaaactgggcggcacaccccctttcttaagctctagctctggaattttatctaaatttctaaaagccctcccccccccaaatttagggcgtaccctcttccgtcagcccccaaagtgggagcacattccttttttcgggcctccaatttgattctgcatttccgttccaatttagaggttcaccctgttatcgggtcctcagatctggggtccattagctaaagttttgggatactttcttgtatcccctctactccaaggaagaattccccttttccaggtcccaaatctgacagcatgccttctggaatttcttacatttaggggccacttcctttcctcagcccttcaaacctgaggttgggccgaaaacaatgtccaaattttgaagtttatgggtacttatttccagtttcacaaataagggaattcactgccttctcccgagactgtattattggggttacacacttttcacgtgttccccaaatcaaactaccttatttcctgaaggagactcattttcatatctgggagtatatttgtttcttgtgccccccaaatgtacgaggtgaaccccttttagttatacaactctcagagtgcagccactttccagatgcttcttaaatttggggggcacacctttttgtgagtcctctcatttccaggtggcgagtggtctgtggttttgagcatgccttcctaccctgtttagcttttctgtcatccaagacattttcattcctcagtttccttccctttttggagccacactccccttgaggtgctttccccagtctggtcagtgcacccatttcctcttcctctggcgagtgcgtatctttgttcagcacggcacttttctctgtgcttctgcgggcttttcttctgagcacacttcccagagtcacacctcctgaattctcctctcctcccagggaaggattcctctcctaaagggctaccagcacattgtttttgataggcctatcttttatctttccgctagcaggatctcttctctcttggcttgcccaatccccaaacatttttctggtttctgtctttctttggaattgttctgtttacctagtggctataaagattttccttgtgctggaggtggcctcaagtctaggactgcctgggcccccagcgctggattcaaagtggaaaccatttctttggttaatcacaggactctgaatcctcctggtggtttacttctagaagacctaagattctgtttaggtgcatactgttttctcctttgctttatctccttgtgctggaaaacaaaaacaaacaaaactctcagatttttccagcactgcttctagcccataaacttcttccctatattggctttcttactatcttttatgaagaaaagatgtcgtttggaggaatcccttggatactctttttgttcttgtccctggggtgtcggtggggaaatggatatttttctctcccaatcatcctcttgtcaatcttctttttttttttttgagacagagtctcgctctgtcgcccaggctggagtgcagtggcgcgatctcggctcagtgcaagctccgcctcccgggttcacgacattctcctgcctcagcctcccgagcagctgggactacaggcacccaccacaccgcgcccgtctaatttttttgtttttagtagagacggggtttcactgtggtctcgatctcctgacctcgtgatccacccgcctccgcctcccaaagtgctgggattacaggcgtgagccaccaagcccggccaacctcttgtcaatctttacccccaatcctcacattaaaatctgcaaatatctgggacctcctatctcttaagagcctcaatagttctttcttttgtgtttccttctgcctttacagatcttattcagggcttctcagcctgaacccccaaccagattaatttctccacagctggaattccaagtgcttggggataatgatacctctgacctttcttccttttgggaagtacttgagtgtgcagctgcatgaggcctcagcaggagagagattttaggtccaagaagctataccagtaggacaaggcaggaaaatactacactttcaggatcaagcccctctgactctcatttggaaactggatgtttgctaagcacctgcttcttaaggatgccgagggatttaatgatactcccagaaacctggagagattaatggggcctatggagaagtgctctgaactcagtgttgggacttgaataaaattaaccattgtcatgttttcagaacaactaagctgttttatatttcatgtgcatgaaagccctagaactaagttgtgttatttccagaaatgaaatagatcccacagttagatgatgtggccattaggaagtaccaaatttataaaaatcactggaggtctgtctgagcagtacctaataaaatatagtatactgaaagtgaacagatactttgtctctttctttggctgcttgatactttatctgtgtactgccgtacagtgcacccttaaagtattctacaccagtgcttctcaaacttgaatgtgcatgtaagtcacccaggggtcttgttgaaatgctgattctgatttggtagatctaggatgggacctgaatgcatttctgatttgcaggtgatgctgatgttactgaactacacttttagtagtgaggtttcatacacgaagacaaagtttctctgtgaaaataggaaggtggtggttagccttatatttttttattttatctttatccagacacacatcccttaaaagtttgtacaaggccatagtcccctttattagttatactcaattagttattctagcacatagctttttaaatattggccaaaactggctgggcacggtggctcatgcttgtaatcccagcactttgggagctgaggcgggcagatcacgaggtcaggagttcgagaccagtctggctaacacagtgaaaccctgtctctactaaaaatagaaaaattacctgggtgtggtggcaggcacctgtaatcccagctacatgggaggctgaggcagaatacttgcttgaacccgggaggcggaggttgcagtgagccaaaattgcaccactgcactccagcctgggccacagagtgagactctgtctccaaaaaaaaaaaaaaaaaaaaggccaaaacttctccaggagtttggtttctgtgtgtatatatatatattttgggtggggacagggtctcattctgtcacccaagctggagtgcagtggtgtgatcacggcttactgcagcctcaaccttctgggctcaagcgatcctcccctcagcctcttgagtttcagggaccactggcacgtgccaccacacctggctaattttaaattttttgtagagatgagatcttgccattttgcccaggttggtcttgaacttctgggctcaagcagtcctccaccttagcttcccaaagtgttgggattataggtgtgagctgccatgcctggctattgccaaatttaaatggttacatatttcttacttgaatgtgaacataattattgatatagaatcattctaataaatactgcatagccagcttgtctgtctggttcctcatcctaccatgagtagggagtctgtgataccccaaatcagtgggtcacaggtgttggaatttccaaagagtccttcttggttttctgggttctggaaatgggccaggaaaagccaggataaagctatgttccccgacctcgaatggaagcttctggctttctctaaatgggtgctccagaaagacaaatgctggggagaagatgatattctttgatggtgatcatgctttatgatgatctttctccttttgtacccacatgtctaatctattctaagtctcaagtgggtttttccttttttcaaaaaatttttttggagacaaagactacctctgaaagtgtttttcctttctaagtgtgttggatcatctgtacctatttccctggctgtcacctgtctggccctcttccacgtgatcctgttgccagccctaatcaggacaaacctgaatgactagactattttgtgtccctgtcctcctccaacccctattcctcacatgagtgtcagatcctattcagtaacggatttgatctggatttggctctagtcctagctcttccatttactgtgagacctcaggcaagtcacttaatgctatgggcctgcttctccccatttgtaaaatgaggggctgatgatctgcaatgtccaccctggctgaatcttggtcgctaccttgcttagaaaccccattgcctgtggtagcttgttgcagcagatctgatttctttcatgtgctcccttgggcagcctgccagttattcccttgtccaagtcacttctgccattatctttttttctagctgaggcagccagcttgttctcaacccaacttcagcgttcttcttgcttccatgtcttcttccagttccatgctgtatttcattcagaactacctgaaatcctcaaagaagtcttcctgagttctccattcaatgtttgtgacttctctgccttaccaagaaggagtctgtaccttatataccccgtatttacttgtcagttctcttatctaatgtatacttaaaaagggacttcatttcctccataccacagctttgttttttggtttgaattagcagggcaggtggcatgaaatttaaagaggaagcaagcaggttgtttgcctttggctgggatttggggaaagtatgagatgtaatgtttttagtccccttccccaagatctcctgtatctgtgggaatcagttgcctggtatgtcttcctggattgtaaaggtgcttaaacttcctttctgaagtttgaaagtgtatcctaagtgcaaataccatttgacaattactcgtggttgggtgggtgcagtggcttacgcctgtaatcccaacactttgggaggccagagtgggaggattgcttgaagccaggagttcaagaccagcctgggcaacaaagtgagattcctgtctctactcccccaccaaaaacaaaaaagtagtcaggcatggtggtgcgtgcttgtagtcccagctccttgggaggctgacgagggagttcagagtctgcagtgagctaggattgtaccactgcactacagctgggtgacagcacgagaccccattgcttccaagtgctcttctaggaacacacagccacaaaacccagaacaaggaattgttaaggataatgataagaaatctgtatttcaaataacttaacaaatgaataaaaccaacagttctttgagagcacctgattattgtcaaagacagttgctgagggggcttggaagtcaggacttaaaggtatatttaacctctggagttttcttctttcatcatcttcctaagaaataatagggaggatgtttacatttttcttgataaagtctttttattaattttatttatttatttattttgagaaagggtcttgctctgttgcctaggctggagtgtagtggcgcagtcttggcttactgcaacctgtgcatcctgaattcaagcgattcttgtgcctcagcctcctgagtagctgggattataggtgcgcaccaccatgcccaactaattttttgtagttttagtagagacaaggtttcactatgttggttaagctgggacatttttcttgataaacattctttaaaccaaaatgtatgcttagtcaagatccttgattggattatgagcctagagaaaaggagggtgatgtctttgtctaatccatctttgccagtgactgccccttacaggctattgactatagggtaacctaatgaaaattgagacaggcactgtggctcacgcctgtaatcccagcactttgggaggccaagtcggatggatcacctgaagtcaggagttcaagaccagcctggctaacacacagtgaaactccgtctctactaaaaatacaaaaaattagtcaggcgtggtggcaggtgcctgtcatcccagctactagggaggctgaggcaggagaatggcttgaacccgagaggcagaggttgcagtgagccgagattacaccactgcgcttcagcctgggcaacaagagtgaaactgtgtctcaaaaaaaaaaaaaaaaaattgaacccttaatttgtaataatgctttgacaactttgctagatcttgggctaggtcctacctggaccttcctctcttttgccaaataatggaactaatgagctggcagaaatcctgtacaattttagaagcctaatatgagtgactaaatgtaaataggacagttttaggaaagagtggtggagcctgaatcagtgaactttggggaaggagcaagaggaggggcttgggatttaaacaaagggtttttttttgttttgttttgttttttgttttttttttgaggtggagtctcacttcgttgcccaggctagagtacaatggtgcaatctcggctcactgcaacctctgcctcccggattcaagtgattctcctgcttcagcctcccaagtagctggtactacaggtgtgtgccacctcaccctgctaatcttttatatttttggtagagactggctttcatcatattggccaggctggtctcgaactcctgacctcatgatccgcctgccagggcctcccaaagtgctaggtttacaggtgtgagccactgcgcctggcctaaaccaaggtttttattcagtgatagtttattccatgtcaggaacataattctcagattttaaaggctgacttccaggtatcttagaaggatatttgggggtctctgtcctagtagagacctgattttcaagaggtctctttctcatatggaaaaagtccatagctggtggattgacattcctttctttctttttttttttttgttgaggcggagtctcactctgtcgcccagaagtgcagtggtgcaacctcggcacactgcaacctctgtctcctgggttcaagcaattctcctgcctcagcctcctgagtagctgggattacaggtgcccgccaccatgcctgggtaattttttgtatttttagtagagatggagtttcaccatgttcgccaggctagtcttgaactcctgacctcaagtgatccacccgcctcggcctcccaaactgctgggattacaggcgtgagccactgtgcccggccaatgcctttcttgcttctacaggtgcacaggtgttgggatttcgaggttgtggaaacttggtctggaaatgtgggcattttacaataatgataactatagctagcatttttggagcactgtcttaaatgtcattgaatccttacatctgacctattatcctgtcctaacagaggaggaaactgagatgagtaatttgtccaaggtcatttggctaataagcagggcctcgattggagtccaggtttctttgcctcctgtcccagtgctcttacatccctctctctctagctaacgtgctttttcccctagaaatttgagtaagtcattttaactacaaatcaaacaggtggcagcctggaaaccagcactgaggcactttgccaccctcaccccagatttcttttttttttttttttttttttgggacggagtctcacattgttgcccaggctggagtgcagtggcacaatctcagctcactgcaagctccgcctcccgggtttacgccattctcctgcctcagcctcctgagtagctgggactacagatgccctccacgatgcccggctaattttttgtatttttagtagagacaggggtttcgccatgttagccaggatggtctcgatctgctgacctcataatccatccgcctcggcctcccaaagtgctaggattacaggcatgagccaccatgcctggctcattcttttttcttttttttcttttctttttttttttttgagacagagtctgactctgtctcccaggctggaaggcagtggcatgatcttggctcactgcagcctccgcctcccgggttcaagtgattctcctgcctcagcctcctgagtacctgggattacaggcgaacaccaccacacccggctaatcttttatatttttagtagagacggggtttcaccatgttgcccaggctggtcttgaactcctgatctcagatgatccaccagccttggcctcccaaagtgctgggattacagacatgagccactggtgcctggcccttttttttttttttttttttttgagatggagtttcaccttgtagcccaggctggagtgcaatggcacgatcttggctcactgcaacctccgcctcccgagttcaagtgattctcttacctcagcctcccaagtagctgggattacaggcatgtgccaacacgcctggctaattttctgttgttagtagagatggagttttaccatgttggtcagtctggtctcgaacccctgacctcaggtgctccacccacctcggcctaaagtgctgggattacaggcgtgagcaagattttattcttttttttttttctgagatggattcttgctctgtcacccaggctgaagtgcagtgacacgatcttggctcactgcaacctccttctctggggttcaagtgattctcatgcctcagcctcctgagtagctgggattataggcctgcaccaccacatccggctaattttcatatttttgatagagacgggtttcaccgtattagccaggttggtctccgcccgcctcagcctcccaaagtgctgggattacaggcgtgagccactgtgcctggccttcattcttgaccatgcaaaacatcctttaattgtagaagcccagttctcccaactcaagctgcctttctacatttttctttcttcttcaatttttgttgttgttgttgtcgtggtcagatacacataatataaaatttgccattttaaccatttttaagttatatagcttactggtattaaataatgttgtgcaaccatcaccactctccatctccgtaactcctcaaaattgaaactctgggccgggtccagtggctcatgcctgtaatcccagcacttcgggaggctgaggcaggtagatcacttgaggtcaggagttcgaggccagcctggccatcatggcaaaaccccatctctactaaaaatacaaaaattagctgggcgtggtagcacatgcctgtgatcccagccactagggagcctgaagcaggagaactgtttgaacgcgggggcgggtggaggttgcactgagccaggattgctgcactgcactccagcctaggtgacagagcgagactccatctcaaaaaaaaaaaaaattataactctgtacccattaaacactgactccctctttcatgaacctcctcccagccccagcagctaccattctactttctgtctccatgtttttgaatacttttctgccttttttgaggctcctgggcatgactggtttgggttgcttgactgtcccttggttccatggagtattgaattctgtgtaatgtgctttgatgagtaggaaattggtcgtgctgtgacctatatgataattagacatgtgcaacttgtaaaggcaaggtaattaaagaggccacttttctttttcttgttttgttttttttttctttttttcttttttttttcttctctttttgagacattctcactctgttctccaggctggaatgcagtgacatcatctcagagctgactgcaacctctgcctcctggattcaagcaattctcctgcctcagcctcccgagtagctaggattacaggcggatgccaccatgcccggctaatttttgtatttttggaagagatgggttttcaccatattcgccaagctagtcttgaactcctgacctcaagtgatccactctcctcggcctcccaaagtgctaggattacaggccactgtgcctggccaagaggtcacttttcatgtccaggctgcatggtatgtggtggtgaggatgtaggatttggaggtggaatgcctgagtttgagtgcctgtatttgccactctcttggggccaaatgtaatttgggcatatggcttaaacctcttgaacctttcattgtgttatgcacattggaggcagaactttccagcctagcaagttacttaacctatatgagcctgtttcctcacccaagtattatcataactgtctgacatcagtcattggaaatatcagtaaatgttaccctttccctccatttcctaatctgtaaaggaaattaaagaaacctggtttggctgggcacagtggctcatgcctgtaatcccagcactctgggaggccaaggcaggaggactgcttgaagccaggagtttgagaccagtcctggccacagagtgaaacctcatctctataacacagaaaaaaaaaaaattagtttggcatggtggtgcacgccttgtagtcccagctccttgggaagctgaggtggaaggattgcttgaacccaggagttcaaggctgcagtgagctatgatcctgccactgtactccagtgtgggtgacagtgagagcctgtgtttaaaaataaaaaaaagaaaagaaaaagaaaacatagtttatagagttttcctggcttgaagatttatgaggagttgagtatatgttaccattattacttttgttttattcctctcagaaaatgtgtgtaaaattcctccatgggcccttcagtgggccttgttagtttgtatttcatccataactttatcagtagtgtatgccaaagaaaaagactcttactttttttttttctttatgatggactctcactctgttgctcaggttggagtgcagtggcacaatcacagctgtcttgcagcttcaacctcctgggttcaagggatcctcctgcctcatcctcgtgagtagttgggactacaggtgtatgccaccgcgcttggctaattttttttttttttttattatttatagagacgaggtcttgctatgttgcctaggctgatctcaaactcttgggctcaagtgattctcctgcctcggccttccaaagtactgggattggccgggcatggtgcctcactcctgtaatcccagcattttgggaggccgaggtgggcggatcacctgaggtcaggagttcgagaccagcttgaccaacatggagaaaccccatctctactaaaaatacaaaaaattagccgggcatggtggcacatgcctgtaatctcagctactcttgggaggctgaggcaggagaatcgcttgaacccaggaggcggaggttgtggtgagccgagatcgtgccattgcactctagcctgggcaacaagagtgaaactccgtcttaaaacaaaaccaaaccaaagtactgggattataggcatgagccactgtcccgcccttacgtttgtttgtgtgttttttttttttttgagacagtgtatcgctctgtcccccaggctggagtgcagtggcacaatctcggttcactgcaacctccacctccagggttcaagcgattctcctgccttaacctcccgactagctgtgactacaggtgcctgccaccacgcccggctaatttttgtatttttagtagagatggggtttcaccatattagccaggctggtcttgaactcctgaccttgtgatctgcctgcctcggcctcccaaaatgctgggattacaggcgtgagccactgcacccggccacattttttttcccctcattttcacacacacaaaactaacagtaatcccttaatatttttaatgttgaaatatcccaaagactttttttttttttttttttttgagatggagtctcactgtgtctcccaggctggagtgtggtggcatgatctctgcttactgcaacctctgccttccgggctcaagagattctcctgcctcagcctgccaagtagctgggaatacaggcgtgtgccactatgcccagctaatttttatgttgttaacagagatggagtttcaccatgttggccaggctggtcttgaactcctgacctcaggtgatctgcccacctcagcatcccaaagtattgggattacaggcatgagccactgcactcagtcccttgtttttaaaagcaataaaggttagtgggggccgggtgcggtggctcacacctgtaattccagcactttgggaagcttaggtgggcagatcacttgagctgaggagttcgagactagcctcggcaatgtggcaaaaccccgcctctataaaaaatacaaaaatgaggaaggggtggtggcacgtgcctgtagtcccagcactgggggagctgaggtggggaggatggtttgagcctgggaggcaaaggttgcagtgagccaggatcatgccgcttcactccaacctgggccacagaaacagaccctgtcttaaaaaaaaaaaaagagggtagtgggttttggaggaaggaggtcttgcttctgaagtcccagctcttctatctagccaggtgactttgggcaagttgtttattgtttatactccttcgtaaaatactgctgacttctctgcattgttgggaatgagatgtttgtcaaggatttagcatgtggtgataaatcagtaaatgttgaatatttcctggtattaataataaaggctaggaataaaaattcatacttaaaggaaaatggacttttatttatttatttatttttgagacagagttttgctcttgtcacccaggctggagtgcagtggcacaatcttggctcactgcaacctctgcctcctgggttcaagcgattctcctgccttagcctcccgagtaggtggtgctacgggctcctaccaccatgccgggctaatttttatatttttagtagagatggggtttcaccacgttggccaggctggtctcgaactcctgacctcaggtgatcctcccgcctcagcctcccaatgtgctgggattactggtgtgagccaccacaccctgccaagataagggaattaatgaattgtctcataaatatcttaggtatttaaaactccataggcatgaaaatgtctctcaaggccctgttgagtaatgatttcatctccaaattgttttcctttgtaatatggtgatatttcaattaagaaattctgtaagaataggccgggtgtggtggctcacgcttgtaatcccagcactttgggaggctgagaccagcctggccaacacagtgaaatcccgtctctactaaaaatacaaaaaattagctgggcatggttgcaggtgcctgtcatctcagctacttgggaggctgaggcaggagaatcgcttgaacccgggaggcggaggttgcagtgagctgagattgcaccactgcaccccagcctgggcgacagagcgcaactccatctcaaaaaaaaaaaaaacaaaaaaaaaaacaaatcttgtaaggatagctggtcaggtgtgtttaaaaaaagacttcccagctgggcgtggtggctcacgcctgtaatcccagcactttgggaggccgaggcaggtggatcacgaggtcaggagatcgagaccatcctggtcaacatggtaaaaccccgtctctactaaaaatacaaaaaaaaattagttgggtgtggtggcgtgtgcctgtaatcgcagctactcaggaggctgaggcaggagaatcgcttgaactagagagttggaggttccagtgagccgagatcgcgccactgcattccagcctggtgacacagcgcgactccgtctcaataaataaataaataaataagacttcccctaggctgtgagcagtggctcatgcctgtcatcccagcagtttgggaggccgaggcgggtggatcacaaggccaggagatcgagactatgctggccaacatggtgaaaccctgtctctactaaaatacaaaaaattagcccagtttggtggtgcacgcctgtagtttcaactacttgggaggctgaggcaggagaatcacttgaaccaaggaggtggaggttgcagtgagccgagattgagccactgcactctagcttggcgacagagcttgactccgtctcaaaactcactccagagctatagactatatcactcagagagtgtagagtattgatagattggagcccccagtgcctgaagaaatggatacagcttttcttaagccccagggataaaactgtgatcagtcttcagttgcttcattccgcatgctttgccttcctctgcacgcaaggagtaataatagttcccacgtttacctgtggataacactcttcaaagaacctccatgtgattatcttcttgaatctatatacccattgaggtggatgatattgatctctttcctgttttttttttttttttttggagacagggtctcttgctctgttgcccaagctggagtacggtggtgcaatcatagttcactgcagccttgaacccctgggctcaagtgattctccagcctcagcctcctgagtagctaggacgacaggtgtgtgtcactgtgcctggctaattatttatttatttatttatttatttatttatttatttcagacagagtttcactcttgttgcccaggctgcagtgcaatgatgtgatctcggctcactgcaacctctgcctcccaggttcaagcgattctcctgcctcagcctcttgagtagctgggattacagggatgcaccaccatgcccagttaattttgtatttttagtctagacgaggtttcaccatgttggtcaggctggtctctaactcccgatctcaggtgatctgcccgcctccacctctcaaagtgctgggattacaggcgtgagccaccgcgcccagcctatttttttatttttatttttactttttgagacagagtttcgctctgtctccctggctggagtgcagtggcacaatctctgctcactgcaatctccgcctcctgggttcaagcgattctcctgcctcagcctcccaagtagctgggattacagggaagcaccaccatgccagttaattttgtatttttagtctagacgaggtttcaccatgttggtcaggctggtctcgctctgtgcccacctctgcctctcaaagtgctgggattacaggcatgagccaccgcgcccagcctatttttttatttttatttttactttttgagacagagtttcgctctgtctccctggctggaatgcagtggcgcaatctttgctcactgcaacctccgcctgggttcaagtgattctcctgcctcagcctccctggtagctgggattacaggcccttggcaccacacccggctaatttctgtgtttttagtagagtcagggtttcaccattttggccaggctggtcttgaactcctggccttaagtgatccacctgccttggcctcccaaagtgctgggattacaggtgtgagctacctagcgcagctctatatttttatttatttgtttatttatttattttttgagacggagtcttgctctgttgcccaggctggagtgcagtggcgcgatctcggctcactgcaagctccgcctcccaggttcatgccattctcctgcctcagcctcctgagtagctgggactacaggcgcccgccaccacgcccggctaattttttgtgtttttagtagagacagggtttcctcatgttagccaggatggtctcgatctcctaacctcgtgatccaccctcctcggcctcccaaagtgctgggattacaggtgtgagccactgtgcctggcctattttttttattttttgtagagttgagatctcactatgttgcccaggctggcttcaaactcctggcctcactcaagtgatcctctcaccttggccttccaaagtactgggattacaggtgtgagcaattgcacctggcctcttttctgtttttatttccattttgccagtgagaaggctgaggttacctctttttttttgagacgtagtctcgctctgttgcccaggctggagtgcaatggcatgatctctgctcactgcaacctccacctcccatgttcaagcgtttctcctgcctcagcctcctgagtagctgggattaccggtgtacaccaccacgcctggctaatttttgtatttttactagagatggggttttgccattttagccagggtgttcttgaactgacgtcaggcgatccacccaccttggcctcccaaagtgctgggattactggcgtgagccaccacgcctggccaggttatatcatttaacaaacatttgaccaccatgttaagggcactgcttgttagatgctggggatgcctatgaggagttaattgcctcttgggagagatctgcttagataggcagtttcagcatagagtgatgaatgctgtggcccagagggtaggttaggttgccatgggagaatgcaggtgtgaaggaagtccttcagggaggttccaatggctaatcctggtcatgaaggaccaggaagagaaagcagcttgtttggccaggtgcagtggcttatgcctttaaccccagcactttgggaggcttagtgagggagggggcagatcacctggtcaggagttcgagaccaccctggccaacatggtgaaactagagactagcccgtctctagtaaaaatacaaaaattagcctggcatggtggcttgctcctgtaattccagctacttgggaggctgaggcaggagagtcgcttgaatctgggagacagaggttgcagtgagccaagattgtgccattgcactccagcctgggtgacagtgcaagactccatcaaaaaaaaaaaaaaaacaaaagcagcttgtttatacaaaggccctggaggtcggaactgcagggtgtttggatgtggcaggagtatgggtggtaagaacagtaataacccttttttctttttctttttctttttttgtgacgcagtcttgctctgtcttccaggctggagtgcagtggcgggatctcggctcactgtaacctccacctgccgggttcaagcaattctcctgccttagcctcctgagtagctaggactacaggcgtgcaccaccatgcctggctaattttttatatttttagtggagacagggtttcaccatgtcggctaggctggtctcgaactcctgacctcatgatccgcctgcctgtgccccacaaagtggtgggattgcaggcgtgagccatggcgcccagcccccgcccccccccccccctttttttttatacacagttttactcttgttccccagtccggagtgcagtggctcgatctcagctcactgcaacctccgcctcccgggttcaggcaattctcctgcctcagcctcctgagtagctgggattacaggcgtctgccaccatccccagctgatttttttttgtgtttagtagagatgggttttcaccacattggccaggctggtcttgaatttctgatctcaggtgatccgcccgcctctgcctcctaaaatgctagaattacatgcatgagccaccatgcccagcaagaacagtagtaaccctgcaagcttattgtgtgccaggctctgctaaataacttttttttttttgacggagtctcgctctgtcatcccggctggagtgcaatggtgtgatcccggctcactgcaacctctgccttttgggttcaagcgattctccttcctcagcctcccctgtaggtgggattacaggcgcatgccaccacgcctggctaattcttgtgtttttagtagaggcgggatttcaccatgttgacaaggctggtctcaaactcctgacctcaggtgatccgcctgcctcagcctcccaaagtgctgggattacaggtgtgagccaccgggcctgacctgtgctaataacttttatcttcacaacacctatatgatggtttgaagtaggtgctggtgatatcctcattttacagatggggagcctgaagctcagagaggaaatgacttgtgcaagtttatctggaaagtggtggggctgaggtccaaactcaggcactcttattccagagttctggctcataaccgctgtgtcccacagcccctctgctaaagcttgcctgcttctctccttttaagctccaaaagagagtttcttttggcttggttataatggctaactcactaatggcccaaatgctgcgctgagtaccttgaatatggttctgtaggggagccgctgaactgttttttttgtttgtttgtttttgttttttgagacagagccttgctctgttgcccaggctggactgcagtggcgcgatcttggctcactgcaacctccacctcctgggttcgagcgattctcctgtctcagcctcctgagtagctggaattacaggcgtgtgccaccatgcccggctaatttttgtatttttagtagaggcgaggtttcaccatgttggccaggctggtcttgaactcctgaccttgtgatccacctgcctcagcctcccaaagtgttgggattacaggcgtgagccaccgcgtccggcctgaactgttttaaaatagaagtcttatgatcatacttacattttagaaatatcactgtagcagcagtgatgaagattggcaacagtgtaattaactggagtcagccttacctcggttcaattccttgtcccaatacctgactagccttggtatttgggaaacttactttgtgaacctcagttttcacatccataaaatgggaataatcctcattacaaacctaagaggtagacactaaatgggctgatatagtttttatatatatgtatatatataccagaatagtatctatctatctatctatctatctatctatctatctatctatctatctatctatctatcttagaatagtatatacatatatatcttagaatagtgtatatatatatatatatatatatatcttagaattgtgtgtatatatgtatcttagaatagtatttgtcataaaataaccactgagaagatgtcatctcatgagacagtattgatttggatctggggaaggtatagctggaggattggagctctgtcaagagctgctggagtaatcaagattagaactgatgcagggctgaactgggcatccacttggcaatggctgagacttagaagcaggtcctacaaaatgttgtccgagtgtgggaggtgagggaaggagaaggaggtaagggaagtgcccatgtttctagtttggcacacttgccaatcttgagggcttatttgatggggacaaaaggagaaggaacttgtaagggtaagatgattagctcagtgaaattgagtaatatgcgaaaggtcatacagcagatacattttagggccaaccctggcacaggccctttccactgcttctgggaaaatccactgatttaatcgactcattctcagtagtttggaatgagtaaactcaactcatgtttgctgtctctttgcattttaattatggaaggcaaagcttgactcttgcagaaagcatttcaagtatctgggaagaaagtgggtgaagttttgaggcctatttctttcttcactcttcttttttttacgacagagtcttgctctgtcgccaggctggagtgcagtggctcgatcttggctcattgcaacctccaccttctgggctcaagcaattctcctgcctcagcctcttgagtaactgggattacaggcacctgccaccacgcccggctaattttttgtatttttagtagagacggggtttcaccatgttggccaggctggtctcaaactactgaactctggtgatccgccctcctcgacctcccaaagtgttgggattacaggcgtgagccaccgtgcctggcttcttccctcttttcattcttgcctgcccttccttccttcctttctttttcttcctccttacctcttctgcctttcctccctccttccctaccttgtcaagtaaaagggactaattccctttcttctagtgtgacctgggaagaggtcctacttgaaccaatttgtcacttccctacgactaaagatacgctctttatgcactttagtatattggatactgtttgttaatttttaataatattgactataattctttgtgtctgatgtcctttttgctagtataccaccattgccatcaccagtaccatttagagtttgctatgctaagcacttgacatccattagctcacttattcttcacaacaaccctaggaaattggggctgttgatcccatcttatagctgggcaaacaggctcagtgatttttcttgtcgtcgctcagccaacaatgcctggagccagaattggttagaatctgagtctaaaacctgtctgtgcacccatccctaggcattccctggccttcctccacggcagaactttggcaaaaggtcctcttggaggcttcttcctgggagacccaggtatcactggaccggctaaaattgtttatgctttcttgggacagcagcatgggctgtgggaagtctcaaccttctaggttcaagctgtgtgtggggaaagctcctttctgccggagattctttgcctgtagtagttgcctttgcttagaagtcacttcctttagatctccttcttgtcacctagttctctgcttagacctcagttcctcagagagtcctttctttttctttttttttttttttgagacaagagtctcgctctgtcacccaggctggagtgcagtggcatgatcttggctcactgcaacctccacctcctgggttcaagcaattctcctgcctcagcctcccaagtaggtgggactacaggtgcccaccactaagcctggctaatttttgtatttttagtagagacggggtttcaccatattggccaggctggtctcgaactcctgacctcaggtgatccacctgcctcggcctcccaaagtgctgggattacaggcgtgagccattgtgcctgtcttgagagtcctttctaacagccgtatctaaaatagtcctttccatgtcgctggttcacattattttgttgtttttcccacaattacttatctctgtcagaaatgatctttatatgctcgcatggcgcagtggctcatgcctgtaatcgcagcactttgggaggctgaggttggtggatcactggaggtcaggagttcgagaccagcctggccaacatggcgaaacactgtctctactaaaaatacaaaaattagccaggcatggtggtgcacgcctgtaatcccagctactggggagggtgaggcaggagatgcttgaacctgggaggcggaggttgcagagagccgagattgcaccttgcacgctgggctgggcgacaagagcgggactctgtctcaaaaaaaaaaaaaaaaaaaaaaggccaggcgcggtggctcacacctgtaatccccagcactttgggaggctgaggtgggtggatcgcctgaggtcaggagttcgagaccagcctgaccaatatggagaaaccccttctctgctaaaaatacaaaaattagccaggcgtggtggcacatacctgtaatcctagctaccaggaggctgaagcaggagaatctcttgaacctgggagatggaggttgcagtgagccgagatcgtgccactgcactccagcctgggcaacaagagcaaaactctgtctcaaaaaaaaaaaaaaaagaaaaaagaaatgacccttatgtatgtgcttatcttgtttcttagctgccttccccactagagaacagggtccgggtgccttgtcctcccattgtctatttccagtacctggcacacagcaggctctcaatgaatatttcttgaatgaggggggcataaagatttaagctggtctttcacctgaagtgtccctcaatttaaagtggttgtattgagttaaaaggcactgtcaccctttaatggaggttgaatcccagccttgtggtgagcaccattagattatcccaaagcctgttctgtagtttctggtggttggcattttattccttgagagtcccagagacttttttcctcgaaagttccagagtttatttccctctactcctgtcccagagctgattcactgaaaggtcttgttccatacccatctatcacttttaattctttgttgtccctcttttccctgagcacaaagggattgctgagggcaagacttccagttaccatagcgacagtactcttttgcctctcccaaaataaaacccagagtctttgtcagtacattaactgtaaatgtgatatgaattcagaaaatatgggcgtggtggctcacacctgtaatctcagcactttgggaggctgaggtgggcaaatcacctgaggtcatgagtttgagaccagcctggccaacatggcaataccctgtctctactaaaaatacaaaaattagctgggtgtggtggtgtgctcctgtaatcccagctacttgggaggctgaggcaggagaatcgcttgaacccgggaggaggaggttgcagtgagctgagattgcaccattgcactgtagcctggggacagagcgagactctgtcttaaaaaaaaaaaaaaaaggaagaaaaatctgctatcatttattgagtacctacttgtttttttttgagacgaatctcactctgatgcctgggctagagtgcagtggtgccatcttggcttactgcaaccttcatcccctggttcaagcaattcttctgcctcaccctcctgagtagctgggattataggtgtgtgccatgatgcctggctaatttctgtatttttttagtagagacagggtttcaccacattggccaggctggtctcgaactcctgacctcaagtgatctgcccactttgccctcccaaagtgttgggattataggtgtgagccactgcgcccagctgactacctactttgtgttagatattttaataggggttttgcagacctttctcatttaattctcatagcacccacgataggggccattatccccatatcataagtgaagaaacagagctcaacaatgtagcttgtaaataaacttggggtaagaatctgaactcaggagctactggactgaggttcgattgctggctcagctccttactatgtgagtgtccttaactttctttttcctcatctttataatggggattaatatagtacttctgtgatttttgtaaggattaaattggttaatatatgtaagtttaattattataaattttttttttgagacagtctcactctgtcgcccaggctggagtgcagtcgtgtgatctcagctcactgcaacctccacctgcagggttgaagtgattgttctgcctcagcctcctgagtagctgggactacaggtgcgcaccaccatgcccagctaatttttgtattttttagtggagacggggtttcactatgtttacctgggtggtcttgatctcttgacctcatgatccgcccgccttggcctcccaaagtgctgggattgcaggcgtgagccaccgcacccagactatacattttttttttatgcgggttttgttagtttggataaggttattttacatctactctctgtaaagttagtttatatctttatcatagtagtagcttaatagcattctttatttaatttattacatatttgttgagtttataatgtagtcctactgtaatgaattttgattaaatattctcttgttttttaatggatgaactacatccagtttgcccagaatcttatgtaaagagctattggtttttctcattttcacaaatgatttatttttatcctggactgtattcttcagcttgaaatggctgagtccaagagtataagcagttccacaggttgttctttgcttctagattaaggtataaaaagatggccatggtcaggaccccaggaggtgttctagtgtacctgtttccccacagctggaccagtgttaggttttgtcttttctaaaaaattaggtatttctgcttgttatataatggtgtgataattttgacacaacatttgaaaagcatccagttgctttatcttcctgtattcaagttatgtttatatctaaagatatgaatataagcatagcaacgactttggtcagagaaagaggaaggacctttgagaagtactttgtctacttctgcgtacatcctgttacttttgataagagggatttctcctgcctcagaggaccttgaaattggctagcacctctgcatgtcagtttcctccctgtaacttaattttacttgtataccatggtaacattacattagtcctaattatataatctggcagttgtgaagatccagtaaatagtaaaatagtgtaagaattaaattcttgcatttaaaaaatttgcaggtttttttttggattttttgtagagatgacatttcaccaagttgcccaggctggtcttgaactcttagattcaagctacctgccccttggcctcccaaaatgctgggattacaggcatgggcctatactcagcctcccaaagtgctgggattataggcatgagccagtgtacctggccaaaaatttgcatatttaaataaccttaaaagaaaaaaatgggccgggcgtggtggctcatgcctgtaatcccagcactttgggaggccaaggtgggtgcatcatttgaggtcaggaattcaagaccagcctggccaacatggtgaaactctgtctctactaaaaatgcaaaaattagctgggcagtagtggcatatgcctgtaatcacagctactcaggagactgaggtgggagaattgcttgagcctaggaggcggaggttacagtgagctgagatcgtgccactgcactccagtctgggcgacagagtgagaccctgtctcaaaaaaaaaaaaaagaaaaaaatatgaagaaacataaagaagcaaccccaccaccagaataaaataaaattttatcatctagataattcctgctgacaattacttctttggtggttttttttgtttgtttttgttttttggcttttttttttttttgagatggaatcttgctctgtcacccagactggtttgcagtggcacgatgtcaactcactgcaacctccgcctcctgggttcaagtgattctcctgcctcagcctcctgagtagctgggattacaggttcccaccaccatgcccggctaatttttgtatttttagtagagacggggtttcaccatgttggctaggattgtctcgatctcttgaccttgtgatcctcccacctcgacctcccaaagtgctgggactacaggcatgagccactgcgcctagcctggaatgggttgtttaatagatagcttattgtccttcacatgtataatcctttacattatacacttgtgaaaaattttcattgtgaaaaactaaaatttaggaaagtatttaagaagaaaggaacaatcaccaataacctataacttatttttttcttcctgtctttacaaaagaatcagtggctgggtaccatggctcatgcctctaattccagcactttgggaggctgagtcaggaggatcacttgaacctgggagtttgagaccagcccagacaaacacatagcaagaccctgtctctaccagataacaaattagctgggtgtggtggcttgcacctgtagtcccaggtgcttgggaggctgagtaaggaggatcacatgagcccaggaagtcgaggctacagtgatccaggtttgagccactgtagaccagcctgagtgacagagtgagcaagaccttgtctccaaaaaaataaattcatatgagtttttttcttttcttttcttttcttttttttttgagacagaatttcactcttgttgcccaggctagaatgtaatggtgcgatcttggctcactggaacctccacctcctgggttcaagtgattctcctgcctcagcctcccaggtagctggaattacaggcatgtgccaccatgcctggctaattttgtatttttagtagagacggggtttctgcatgttggttaggctggtctcaaactcctgacctcaggtgatccggcagcctcggcctcccaaagttctgggattataggcatgagccaccatgcctggccttttttttttgtttttgttttttaaagagacaggttcttgctctgtcactcaggctggagtacagtggcacaatcataactcactgcagtctcaacctcctgggctcaagcgatcctcctgcctcagccttttcagtagctgggattataagcctgagccacctcatctggctgtgtatgagttttaatgtgagctccatgtggtacaattttgcatcctgcctttttatgtaatatattgcaagcaaattcttcataaaatgtgctgctattaaacattagacatgtactcacttctgtgatttttttccatactcatttattgcaaagaaagtgttctggtaggaggcaggcattgctctggcagtgctctggcattgcttgggcagtgtaggctgtcaagagccaaagtataaggctggatgcagtggctcgtgcttgtaatcctgtaatcccagcactttgggaggcccaggcgggaggattgcttgaacccaggagtttgagatcagcctaggaacatagatactctctctgcaaaaaaaaaaaaaaaaaaaaaaaaaaaagctgggtgtgctgacgcatgcctgtgattccagctactcgggaggctgaggcaggagtattgcttgagcccaggagtctgaggctgcagtgagctatgatagcgccactgcattccagcctggacaacagaatgagaccctgtctaaaaaaaattttaaaaagtccagagtttagtgggaggaaagagttaggctggggtaagtctgctgtaaggaagtggcctgttcaagtgcccttagagttcagagtggctacatgtccatcagaaccaccactagctcctccgatagcatttaggaccctgcagattagtagattaattacctcagtgatcacaagaagtgttctttttttttttctttttcaagatggagtcttgctctgtcacccaggctggagtgcagtggcgtgatctcggctcactgcaacctccgcctcccaggttcaagctattcttctgcctcagcctcccaagtagctgggattacaggcgcctgccgccgcgccccactaattttgtatttttagtagagatggggtttcaccatgttggccaggctggtctcaaactcctgaccttgtgatccgcctgcctcggcttcccaaagtgttgggattacaggcttgagtcaccgcacccggccggaagtgttcttttatgggggccacttttcttgtaaatggcctaatccagtacaccttttttttccatcaaaaggaaattggctttactgtttggttctgatcataaatataaattttattcattgcagcacgagtacacgagacaggattgagaaaggagagattcaaattgtgacttcagattcaaaggcaattaaaggaattaaacgtgaatatttttactgttttattgttctatgattaaaaaaaaatctgggtaaaacttataggaaaatacaaatgatcagaatggactcaagaagtaggaaatatagctgggcatggtggcaggtgcctgcaatcccagctacttgggaggctgaggcaggagaatcacttgaacccgagaagcagaggttgcagtaagccgagatcatgccattgcactccagcctgggcgacaagagcgagactcctcaaaaaacaaaccaacaaacaaaaaaagaagtaggaaatatacatagatcaaagaaagtataaacaattctgggcgcagtggttcacgcctgtaataccagcactttgggaggttgatgtgggcagatcacttgaggtcaggtgtttgataccagcctggccaacatggtgaaacccaatctctactcaaaatacaaaaattagctgggtgtggtggcatgcgcctgtagtcccagctactcaggaggcctaggctccagaattgcttgaacctgggaggtggaggatacggtgagctgagatggcaccactgcactcagcctgggtaaaagagtatgactctgtctcaaaaaataaataaataaacagacctcgtacagccttccaaaagtagcaccaagtattaatatctcaacttttgtttgcttcgtttttaattttttttgtttttaagagacgagcgtttgctatgtttctcaggctggtcttgaactcctgggctcaaagaaacaacttggctctgccttccaagtagctggggctataggcatacattactgtgcctggcatttgtttgcttcctttgtaactctttaaatttcattgcaattacagtttgcagttatttatcagtttgctggctaaatttttgtgtttccccggtagactgaagggttcttgagggcaggagctgtgtctcttttggtcttgattgtttccttaaatagtcgctgagcaaatatttgttgaataatgcatcagcagatgactgaatttaactgtgaaagcagttgtttttttgtagttctgaggggtggcccttggcccttgtaggtgagtggtaagcagtgttgagggagggtcttcttagttccagaaaccacaggaagctgcacgatggaggaataggaaccagtggaagacacacctgtgttagaatgaggacaccaacagggtttcatggagctttgtgttttgaataatgcctgtttttttatgtgtagtgaatgatgctacactctgggtggactttgcctaagtttcataaatatttaattggctttttcaggagaataaaggcagccccgttgatgactgaaaatgacaaagcatccacctaacagacgaggaatcagctttgaagtgggagcccagttggaagcccgggaccgtttaaaaaactggtacttttacatttttctgttaattaaagcccttcagtaaaggatttttgccagcactgatagagtggtagcttaggctttttttgtggtgtttttctacttcctgactcttggaagatgtgaggaaatgtcagtcttttctctttgatgcagggatcccagtgtcagggtgactgtcctgtaaccccctgtatatatttgtttcccccttttgcctgttcatctgaaagagttctgggaaaaagaagcaggaatggctacagggaagggaagagttaatagtggcagctctcttgctcctggctgcctgtctgaaaaaagaggaaagatcagggatggaatagtgaagaaaaaggggttcgattggagcagctcatgtgttgtgaacaccccatcctattttctgggcatgatcttgtatgttgaaatacagtcatcatgtaagggcacactgtcagggtgattaggttcagaagctgaggggttatagtcccagctgtgtcattgacttgtgacctctggctggtaattagctgctttgtgcattggcttatctataaatgtgggtattggtaatattgacctcatagggttattctgagaatcaaatgatagaatatgtaaggaaagaccttatagactgtgaagtgattgttgtggttgagggcatcctagaatttggtcattttttggtgctcaaggtgagcgtggggttttcagaacttatacctctttaagggtttttgttttttttttttagacagagattcgctctgtcacccaggcagatcttggctcactgcaacctctgcctcccaggttcaagcagttctcgtgcctcagcctcctgagtagctggtattgcagatgtgtgccaccatgcctggctaattcctttttgagctaaagaaggaagagtttaaccctttttgagattctttcaaaatagattgatcagctcttcaggtgtaggaagataagacaggagaagagaggcatagaagcagctggtacagaaaactgtctttgctattagaattaggtacacttggctgggcgcggtggctcacgcctgtaatcccagcactttgggaggccgaggtgggtggatcacctgaggtctggagttcgagaccagcctggctaaagtggcgaaaccccgtctctactaaaaatacaaaaaattagccgggcatggtggtgcatgcctgtaatcccagcttctcgggaggctgagccaggagaattgcttgaacccgggaggtggaggttgcagtgagccgagattgcaccactgcactccagcctgggcaacagagtgagactcggtctgaaaaaaaaaaaaaaaaaagaattaggtacacttggccagttgtggtggctcacgcctataatcccagcactttgggaggctgaggtgggcggatcacgaggtcaggagttcaagaccagtctggccaacataatgaaaccccgtctttactaaaaatataaaaattagccgggcatgatggtgcacgcatgtagtcctagctactcaggaggctgaggcaggagaatcacttgaacctgggaggtggaggctgcattgagccaagatcgcgccactgcactccagcctgggtgactgagcgagactccgtcccggaaaaaaaaaaaaaagaaaaaagaaaaaataattaggtaattaggtacattttcaacacagttgtttttgggctattttttttttttggagacaagagtcttgctctttcattcaggctggagtgtagtggcgtgatctcggctcactgcagtctttgcctcctaggttcaagcaattcctctgcctcagccttctgagttgctgagattacaggcatgcaccacgatgcccggccaattttttgtatttttagtagagacagggtttcaccatgttggccaggctggtctccaactcctgacctcagatgatctgcctgcctcggcctcccaaagtgctgggattacaggcgtgagccaccaagcctgcctgtttttgggctatttgtattatctataattagttccttttttggtttcagtatatatatatgtgtgtgtgtgtgtgtgtgtatatatataatatactgcgtgtgtgtatatatattatatattgtatgtatatatattatataagtagtatcatacaacttgttttttttctgtgtctttgttttttatattcaatatgtttttgtgatttacccatacttaactccgcaccctcctcgcccacccctgatatagggtcttactctattgctcaggctggagtgtaatggcacaatcatagttcactgtggcctccaactcctgggctcaagtgatcctcctgccttagccctccatgtatctgggactacatcttaacttctgtatagagttttattgtatgaatataccacattttgtttatctagtcccctactaatggacgtttgtttgtttgtttatttatttatgatggagtctagctctgtcacccaggctggagtgtggtggcacaatcttggctcattgcaacatccgcctcctgggttcaagcagttcagcctcagctgggattacaggtgcccaccttgccaagctactgtatgttttttttttttttttttttttgagacgtagtcttgctcagtcgcccaggctggagtgcagtggctcgatctctcctcactgcaagcactgcctcctgggttcacgccattctcctgcctcagcctcccgagcagctgggactacaggcacccaccaccatgcccaactaatttttttgtatttttttagtagagacggggtttcacggtgttagccaggatggttgcgatctcctgacctcgtgatccaccctcctcggtctcccaaagtgctgggattacaggcgtgagccaccgcgcccagcctaatttatgtacttttagtagagatggggtttcgccattttggccaggctggtctcaaatttgtgacctcaggtgatccacccaccttggcctcccaaagtgctgggattacaggtgtgagccaccgctcctggcccgtttatttatttattattttttattgtatttttttttaaatgggtgcttaaattccagtttttcacctgagacacagtgctgtgtgaatgtctctttgtgcacatacacagacttttacttgggcagtggcttttgaccacaacctacagtaagaaatgtattttaaatccagtgtggtactcaaccatatgtacataaaaatttatttttattttgtttttattattatttttttgaaacgctgtcgagacagcgtctcactttgttgcctaggctgtaatgcagggtcgtgatcttggctcactgcaatctccgcctcccaggttcaagcgattctcgtgcctcagcctcctgagtatgtgggattataggtgtgtgccaccatgcctggctattttttttttatttctagtagagccggtgtttcaccatgttggccaggctggtcttgaactcctggcctcaggcgatctgcccaactcggcctcctgagtgctgggaccacaggccagatccatggcacccggcctatttttatttttccagacaaggtctcattctgttgctcaggttggagtgcagtggtgggaacagagctcattgcagctttgacctcccttggcttaagcagtcctcctgcttcagctgggaccacaggcacatgccaccacgcctgattttttattattattattattattattattattattattattattattttgagatggagtcttgctctgtcgcccaggctggagtgcagtggcgcaatctcggctcactgcaagctccgcctcccgggttcacgccattctcctgccttagcttcccggctaattttttgtaattttagtagagacggggtttcactgtgttagccaagatttacctcgtgatctgcccgccttggcttcccaaagtgctgggattataggtgtgagccactatgcccagccacacgcctgattaatttttaaatttttagtagagatgaggtctcactatgttgccaaggctgatctcgaattcctgggctcaggtgatcctcctgccttggcctcccaaaatgctggggttacaggcataagtcaccatacctgatctatataaatttaactgaaacacaaattttatgaagtagtatttaaccttaatacatgcattatactctggtatttttttcagttcttttttttttcgtttgggacagagtcttgctctgtcgcccagtctggagtgcagtggcacaatcttggctcactgcaacctccacctcctcctgggttcaagcgattctcctgcctcagcctcctgagtaactgggattacaggcgcccgccaccacacccagctaatttttgtatttttagtagagacagggtttcactgtgttggccaggatggtctggaactcctgaccttgtgatctgccctcctcagcttcccaaagtgctgggattacaagcgtgagccaccatgcctggcatttttttttttttttttttgatatgtctcactctgttgcctaggctggggtgtagtggtgcagttacaactcattgcagccttgacttccaggctcaggtgatcctctcacctcagccttctgagcagatgggactaccagcacataccatcatgctaggctaattttttgtatttttagtggagatgaggtttcactatgttggccaagctggtcttgaactcctgacctcaagtgtttcacctgcctcggcttcccaaagtgctgggattacaagcgtgagtcaccatgcctggcacatatttaggtttttaatccacctggaattcattttatgtgtagtatgaacttgtatctaattattattttttaattcaatgaataaccagttgctccaatatcatgtttagaatagtccattctttccctattgacctgcaataccacttgtatgtactaagcctcatatttacataggcctgttctcagatctttagtctattccattgatttatgtttactcctgtgcttgtaataacacattatttaattgatattgctttaacataactcttgatatctggtaagacaggttttattttatttgttgtattcttagacctttactcttttttttttttttttttttttgagacggaatcttgctcagtcgcccaggctggagtgcagtggcacgatcttggctcattgcaagctccgcctcccgggttcacgccattctcctgcctcagcctcccgggtagctgggactacaggtgcctgccaccacgcccggctaattttttgtatttttagcagagacggagtttcactgtgttagccaggatggtctcgatctcctgaccttgtgatctgcccgccttggcctcccaaagtgctgggattacaggcatgagccactgcacccggtcaacctttactctttaatgtgaatttttgtagtattgttgagtgtcttgaaaagtgtttttggagttttgaagtaaattgtatttaattggtatcttgataaaaagttttcattcatgaaaatacatctttatacttattcatgttttactttatgaactttagtgatgttttataacctccataaagattttgcatgttatctgttagatttattcctaagtactgtctagtttttgttgcttctatgaatggatcttttttttttttttttttttgagatgaagtcttgctctgtcacccaggctaaagtgcagtagagcgatttgggctcactgcaacctccgcctcccaggctcaagcagttctccctgcctcagactcccgagtagctgggattacagatgcccgccaccatgcctggaatttttgtatgttttagtagaggcggggttttgccattttggccaggctggtcttgaactcctgacctcaggtgatctgctcacctcggcttcctaaagtgctgggataacaggcgtgagccactgcacctggccagatctttatatatatattttttctctttggttattgctggcatgaaggaatattgttaaccaaattcagtatgtggattttatatagtttgaaaacaaaagcagactgcttaaaaaagatttatgacatttatgagattgttggaagtttgaacattgattggttatttgatattaaagaatcgttaacattttagatgtggaagtgatattgtaattttgttttttaagagttcttatttcttagagattatatacctacatttatgaataaaatgatacattgtgatttgcttcaagataatatgaagattctgtaattatatgcagtaggaagaaaaaggagataatatgaagggggaaaagggtgggaagatagaggaagcaaaagcggccatgtgtaatgggtacatgagtctttattgctattgagtcttgtatctggtcttacacagaaacctttctccattttcatgttcatcttaatggttcttttggattttctacatagaccatcatgtatctgcaaacaactgttttgcctcttcctttccaatcctctgcttctcatttcttttcctttcttccttccttactttttttctttccttcccgttttcccttctgtgttcattgactaggatcatagcagcaagatgttaaatgacagtgatgatagcagccttccatagtttgttgtttgactttaacaggaacgcatccgagagttcaccattaagtatgatgtttatcataggatcatagtagatgtgtttagtcagattaaagaagttcatgcctattccttgtttgctggaagttttttttttttcagcctgagtaatgttgaatttaatgcttttgggcatctaattaactggccatgcgtattttcccctttaatcttcatttatttatttatttttatttttattttttgagacggagtctcgccctgtctcccaggctggagtgcagtggtgcatcttggctcactgcaagctctgactcctgggttcgtgccattctcctgcctcagcctcccgagtagctgggactacaggcgcccgccaccacgcctggctaattttttctatttttagtagagacggggcttcaccatgttggccaggatggtctcgatctcctgacctcgtgatctgctcgcctcggcctcccaacgtgctgggattacaggcgtgagccaccgcacctggccccaatttttttttttcttaaccgtgtctttatggaaaagaggaaaacgttatggccatcttgtacaaatttctaggaacaaattttaaacttaacatttggccagatgcagtggctcatgcccgtaatcccagcactttgggaggccaaggcgggtggatcatgaagtcaggagttcaagaccagcatggtgaaaccccgtctctactaaaaatacaaaataaattagttgggtgtggtggcacatgcctataatcccagctacccctgagtctgaggcaagagaattgcttaaacctgggaggtggaggttgcagtgagccaacatcacgacgccattgtactccagcctgggcgacagagcaaagctctgtcttggaagaaaaaaaaaacaaagtttcaacttaacatttaaaagatattctgggcctggtgtggtggctcacacctggaatcccagcattttgggaggccaagcctggtggatcacctgaggtcagcagtttgagaccagcctggccaacatggtgaaaccctgtctctactaaaagtacaaaaatcagtcagacatggtggtgtgcgcctgtagtccaagctacttgggaggctgaggcaggagaatcgtttgaacctgggaggcagaggttgcagtgagctgagattgtgccactacacttcagcctgggtgacagagcaagactttgtctcaaaaaaaaaaaaaaagataatccagctgggcatggtgactcatgcctgtaatcccagcactttgggagggtgaggtgggaggattgattgagtcaaggatttcaagaccagcctggacaatataatgagaccctgtctcaaaaaaaaaaaaaaaattctgggcatggtggtacatgcctgaagtcccagctacttgggaggctgaggcaggaggactgcttgagcctaggagtttgaggttgcagtgagctgcaattgtgctgatagccgcaggtggcagtcaaatgcctaggcagatagggacagttccctggtgaaacctgactgtcaaaccaaggacagtttgtttgtttgtttatttattttttgagacggagttttgctcttgtcgcctaggctggagtgcagtggcgcgatctcagctcactgcaacctccgcctcctgagttcaagcgattcttctgcttcagcctcccaagtagctgggactacaggcaggtgccaccacacccagctaatttttgtatttctagtagagatggggtttcattatgttggccaggctggtctcaaactcgtgacctcaggtgatctgcccgcctccgcctcccaaagtgctgggattataggcatgagccactgtgcctggcctccaaagacagtttaaagcctgaaagccaagctacaagtcctgggtaaatccacggactggattgagaacctctcttccagttcggcaaggtttcctctgattgatccccacccttcacctgttttacatgtatttactcttccctgattggttttttacactgtcatgcccacctttgagtgacgcctttgttttagcctttttgttatatgcacaaaccaatcagcatacattccccattctgaacccataaaagccctgccacactgagagggagactacctgtcttcaagtgggagagtaccctcatgtgggtgctcttatgagcctcattttagcagtaagaaaaaggagtctcagagagatgaagttatttgcccaaggtcacacagtggtaggactagggtttgaatcaaagtagactgagttcatagcatttttgtaataaccaaatttctccagagtgtctgaatgttcctgactcctaaatcaaaaaacaaaacaaaacaaaacactggaaaatgcattctgattatgttcacctgatttcctaatctagagtactggacatttaattgtttggtaaaatctttgactttgaatgctttgccaaaaacaatggagcgtttgttttattatctctagactgaaagtggttatgttttcaccctggtaagtgatttgcttacattatagtagatagtattgctgcaaggtacaaccatattttttgtgtgtgtctgtgtctctctgtgtgtgtatgtgtgtattttcagtccattgaaatgaaatgtgtgggaattaggttccactttttttttattttcatttttttgagacagagtcttgctctgtcgccaggctggagtgcagtggcgtgatctcggctcactgcaacctccgcctccagggttcaagcgattctcctgcctcagcctcccgagtagctgggactacaggtgtgcgtcaccacgcccagctaatttttgtatttttagtagacatggggtttcactatgttggccaagatgatcttgatctcttgacctcatgatctgtccacctcggcctcccaaagtgctcacattacaggcgtgagccaccacgttgggctagggcccactttttaattgcttatgtccttgtgacttcttgcctctgaatccttgaattatttgttcttatttttgggccctaaagaaactaagtcccagcttttttttttttttgagatggagttttgcttttgttgcctaggctggagtgcaatggcacaatctcggctcactgcaacctctgcctccctggtacaagcgattcttctgtctcagtctcccaagcagctcggattacatgcatgcgccaccacgctcagctaattttttttgtatttagtagggacagggtttcaccatgttaggctggttgagaactcctggcctcaggtgatccacctgccttggcctcccaaagtgctgggattataggcatgtgccactgtgcccggcccagtccctgctttttatttatttatttatttttattttttaatttttttgagacggagtctcgctctgtctcccaggctggagtgcagtggctcgatctctgctcactgcaagctctgcctcccgggttcccaccattctcctgcctcagcctcccgagtagctgggactacaggcacccgccaccacgcccggctaatttttttgtatttttttaatagagacggggtttcaccgtgttagccaggatggtctcgatctcctgacctcgtgatccacccgcctcagcctcccaaagtgctgggattacaggcatgagccacagcgcccggcccctgctttttattaagaaaattttctaacataatgaaaagttgagaggacattataccttccacctgtattcactaattgttaacccatttgttttatatacttatttaatttagcaataattttataatatctaatatccagagatattcagatgttcttgttgttccaaaaatgtcccttatagtatttttccagacaggatccacattacttttttatttttatgtctctttagttgctttgattccatgataatctttcttcttcccgggaggcagagcttgcagtgagcagagatcgagccactgcactccagcctgggagacagagcgagactccgtctcaaaaaaataaaaaaatttttccccttcacaacattatttgtttaatttttaagagttccgaacagttgttttttagaatgtcccacattctggtttagtcacattgttttatcatggtgagtttaacttgtttcttgtattctcttctatttcccgtaaactggaaatgaggtctagacttcagattaaacattttttttgcagagtgtttcagtggtaatgccgtgtgtttcatattgcatcacatcgggggacacataaagctaggtcgtcccactgttccgtgtatcacttggataaggtaatgacttccatctctcaccattataaaggtgtatttttccttgtgcaagtagtagataatctgtggggatactctggtacgtgtcaatatcctattatccccccacatcatttacctaatgatttagcatccattgataatccctgcctgaatcagttattactctggagatggaaaaatggtaatattctagttttgtcattctgttatattaggtgatgttcttctgtacgaacagctttcatttttattattattatttttgatacagagtctccctctgtcgcccaggctggagcacagtggtgcgatcttggctcactgcaagctctgcctctcaggttcacgccattctcctgcctcggcctcccgagagctgggactacaggcgcccgccaccacgcccggctaattttttttgtattttttagtagagactgggtttcaccctgttagccaggatggtctcgatctcctggcctcgtgatctgcccatctcggcctcccaaagtgctgggattacaggcgcggtgagccaccgcgcccggcccatttttattcttttaaagtgcacttaggaataagattattgagtgtggtggtgtagtcaattccattcattattattaattttgtgctaaaattatcccaaatttgtccagtgggatgctgtttaaactagctcctttgttcttttgacaattcctgttagtcccttagcattttcttgttttctggcactactagaaaccccaaacttactttctacttttcttatcccagaccctggacgcagctggttctccaaggcttggtttctttaattaggaaagggtatttagaaattgacctctgagctgggcacggtggctcacgcctgtaatcccagcactttgggaggcctaggcaggtggatcagaaggtcaggagttccagacaagcctggtcaacatagtgaaaccctgtctctacgaaaaatacaaaaattagccaggcgtggtggcacgcacttgtagtctcagctactcaggaggctgaggcaggagaattgtttgagcctgggaggtggaggttgcagtgagccgagatagcgccattgcactccagcctgtgtgtgagccaagatcacaccattgcactccagcctgtgtgtgagccaagatcacaccattgcactccagcctgggtgacagagtgagactccgtctcagaaaaaaaaaaaaaaaaaaaaaaaaggaaattgacctctgaggttgaggctgcagttagctatgatcacaccactgcttgggtgataagaataagactctatctctaaataaaataaataaataaataaataaaataaaacattggtttttaaaaaaagaaatttagctctgggcactgggtgtgtttattgctgctaggatgtcattgtcttaaacaactttttagtagatgggggtaagaaatctattttttgaaaaaatgtgagttcactttgatacttccaatttatttatttatttttttgagatagtcttggtctgtctcccaggctggagtgcagtggtacgatctcggctcactgcaacctctgcctccctagttcaagcaattctcctgcctcagcctcccaagtagctgggactacaggcgcatgccaccatgcctggctaattttgtatttttagtagagatggggtttcaccctcttggccaggctggtctcgaactcctgacctcaagtgatccgcctgccttggcctctcacggtgctgggattacaggcgtgaaccgctgcgcccggcctataatattaaatttaagttggaaatatcaggcctgggtaacagagtaagacactgtctcaaaaataaataaataggccgggcgcggtggctcacgcctgtaatcccagcactttgggaggccgaggcaggtggatcacgaggtcaggagatcgagaccatcccggctaaaacggtgaaaccccgtctctactaaaaatacaaaaaattagccaggcgtagtggcgggtgcctgtagtcccagctacttgggaggctgaggcaggagaatggcgtgaacccgggaggcggagcttgcaatgagccgagatcccgccactgcactccagcctgggcgacagagcgagactccgtctcaaaaaaaaaaaaaaaaaataaaataaataaataaataaataggccatgcatagtagctcaagcctgtattcccagcactttgggaggctaaggtgggcggatcacctgaggtcaggagtttgagaccaaactggccaacatgatgaaaccccgtctctactaaaaatacaaaaattagccgggtgtggtggcaggtgcctgtaattccagctactcgggaggttgaggcaggaaaattgcttgagccaaaggaggcagaggttgcagtgagctgagattgcgacactggactccatcctgggtgacagagggagactctgtcccccgaaaaattataaataaataagtaaataaatagatgaaacaaaaagaactaacatagaatatgcatggtgtaactatgctaaatgaaactcaaaatatggccagacacggtgactcatgcttgtaatctgggcactttgagaggctgaggtgggcagatcacttgaggtcaggagttggagaccagcctggccattatgacgaatccatgtctctacttaaaatacaaaaaattagctggacattgtggcatgtgcctgtaattcttttattcttttttttttgaggcagagtcttgctgtgtgtctcccaggctggagtgtagcgcgagtgatctcagctcactgcaacctccacctccctggttcaggtgattctcctgcctcagtctcctgagtagctgggactacaggcgcatgccaccatgcctggctaattttttgtatttttagtagaggcagggtttcactgtgttagccaggatggtctcggtctcctgacctcgtgttccacccgcctcagcctcccaaagtgctgggattacaggcgtcagccaccgcgcctggcatgcctgtaattccagctacttgggaggcctaggtaagaggatcacctgagcccagaaggcagaagttgtagtgagccaagattgcagttgagactctgtctcaaaaaaacaaacaaacaagcaaaatcgttttggaaatacatatatattccccctccagctttattgagatataattgacaaaaggcatttatatatttgtttatttttgagatggagacccgctcagtcccccagactagactgcaggggctggatctcagctcacagcaacctccatctccggggttcaagtgattctcctgcctcagtctcctgagtagctggaactacaggcacgcgccaccatgcccagccgatttttgtatttttagtggaggtggggttttaccacgttggccaggatggtctcgatctcttgacctcgtgatccacttacctcagcctcccaaagttctgggattacaggcgtgagccactgcacccggcccgaaaatctttgttcctaatcatactttaacctacttgccttattctgtgttatatgtgaaatagttttaaagttacaatatcaatattactattaacaagtatactgagtgaattttaaggattttttgacatttgaaaaatgtatatcttactcaggacaaattatatttgatttatgtcataaactttttttaagttttttttttttttgagacggaattttgctgttgtcatccaggctggagtgcaatggcgcaatctccggtcactgcaacctctgcctccggggttcaagcgattctccagcctcagcctcccatgtagctgggaatacaggtgcctgccaccacacccagctaattttattttgtaattttagtagagttcgggtttcactgtgttggccagactggtcttgaactcctgaccttatgattcgcccgcctcagcctccgaaagtgctggaattataggcgtgagccactgcgcccggccgatttatgtcataaacttaatccaaaattaaatgagttttttttttttcttcttctttgagatggagtcttgctctgttgcccaggctcgagtgcagtggtgcaatttcggcttactgcaacctctgcctcctgggttctagcgattctcttgcctcagcctcgtgagtagtgggattacaggcgtgcaccactacgcctggctaattttttgtatttttagtagagacatggtttcaccatgttggtcaggctggtctcgaactcctgatctcatgatccaccctccttgtcctcccaaagtgctgggattacagacgtgagccactgcgcctggccataagtgttgttgttgtttttttttaatctgttatgtgaactaacagttctttcttttttttttaaatactcctacagtctaattttatttccgcatttatttatttatttatttgagacagagtctcattctgtcacccaggctggagtgcaatggcgtgatctcagctcactgcaatctccgcctcctgggttcaagagattctcttgcctcagcctcccaaataggagggattacgggcccctgccacggcgcccagctaatttttgtatttttagtaaagatggggtttcactaggttggccaggctagtcttgatctcccgacctcaggtgatccacctgcctcggcctcccaaagtgctgggattacaggcgtgagccaccacgccagacctatttctgcatttaaattatttttggggccaggcatggtgtcccacacctgcaatcccagcactttgggaggccaaggtgggcatattgctttgagctcaggagttcaacgacagctgggggcaacatggcaaaaacctgtttctacaaaaaataaaaaagttagctgggtgttggtagctcctggctgtagtcccagctactcaggagacaggctagagaatcctttgagcccgggaagcggaggttgcagtgagcccagatcgtgccactgcattccatcctgggtgacagagtgataccctgtctcaaaaaaatttaaaaaataaaattattttttggccaggtgttgtggcttatgcctgtgatcctagcatgtttagaggctgaagtaggcagatcacttgagcccaggagttcaagacaagcctgggcaacatgacaaaaccccatctctacaaaaaaatataaaaattatatttttataattaaagtataaatttaattataattaaattacaggcatggtggctcacacctgtaatcccagcactttaggaggcctaggtgggcagattacttgagttcaggagttcgagaccagcctggccaacatggtgaaactccgtctctactaaaagtacaaaaaaaattaggcgcatgcctgtaatcctagctactcaggaggctgaggtgggaggcttgcttgaacccaggaggtggaggttgtagtgagccgaaattgcgacactgcacttcagcctgggtgacagagcaagactccgtctcaaaaaacaaaacaaaacaaaacaaaacaaaaaattagctgaggtggaaggattgcttgagcctgagaggttgaggctgcagtgagccatgatcctcctacttcagcctcctgagtagctgggactacaggcatgtgccgccacccttggctaagttttgtattttttgtagaggtggggtttgccatgttgcccaggctggtcttaaacttctgggctcaagcagtgcacccacctcatcctcccaaagtgctgggattacaggtgcctggcctagcatttttgagacagagttttgctctgtcaccaaggctggagtgcagtggtgtgatcataactgtagcctggtactcttgggctcaagtgatcctcccacctcagcctcctgagtaggctgggactataggtgcatgccactgcacctggctcatttttgtatttgttatagagactgagtctcgctgtgttgcttaggctggtctcaaactccagggctcaagtgatcttcctaccttggcctcccaaagtgttgggattacaggcatgagccactgcacctggcctatattctaatttttaatctaccactttggggtgaactttcagcatgtccattttcttctctgtagaaggggtaatcctgccttccctgtttttgttttgttttgttttgttttgagacagtcttgctctgctgcccaggctggagagcagtggccctatctcggttcactgcagcctccatctcctgggttccagcgattctcctgcttcagcctcctgtgtagctgggattacaggcatgcaccaccacacccagctaatttttgtatttttagtagagacatggtttcaccatgttgaacagcctggtctcgaactcctgacctcaggtgatctgcccgcctcagcctcccaaagtgctgggattacaggcgtgaaccactgtgcccagccctgccttccctatttgcttcctgcgttttatagatgaactaaaatctgagaggctgcagtttcctagtagtgatacttggtggatagaatagaatctgcttgctctgctgccttcgccttcttcctgtcatctgtcaggagtgtgccatctgttccaagaagtaggctggccttccctgttcttgctccaaacacaacgaaaaagctccttctgttgctttcctgacactctggtacctttccactactgtgtttctatttaagttgatcatagttcgcttccatttcttgtacagaagatttaaaaatctgagtttcataatgtccttagatcatttttggtttctttttcattagggttatttgtactgatctcatctgagtttctggttcatacctctttactccttacaccatctgtgtgtgtgtgtgtgtgtgtgtgtgtgtttttaagcaatcttttctgagctttccacaaacatgtattgaatgctgtgagtcaggtggtacactaggtgctatgaaatgaaggaaaataagtacttcaagatgttcagagacgagtcaagtatttggctttggtttttagtattgatagccaagggtcgttaatcatgtattctaatgcttatgtctttgctagtgactcacatttattgagtgatttactctgtgccaggcacaaatctaaaggctttatatgttatacctcctttaatcctttagatgctatgaagggggtacttttattctactttatatatgaggaaatagaagcagaaagcagttaagttttccagtgctatgtagctgtaaatggtgaatttaggatttgagtctagctagttggcttctgagcatggtcgggtgtggctttgatccccacgcatgtgttcagtacctagaataaagtccctgaaattaaatatattatgaggagatatttactctgtacaaagttcatttacaaaaacccctaggggagaatagttaatttcatatgtgggaatttcagaaggcttcagaaagatgacttttgatgccaagtcattcattcaatgctagatgctggagaaatagtggtgattaggacagacatagtccctgatctttagaagctgacattccagtggaggtggatagaacagaaaccagcagactgatatatatagataatgttaggtggtgataaatgctagaaagtggaataagtactttttttttttttttttttgtgagatggagtctcactctgccacccaggctggagtgcagtggcatgatcttggctcactgcaagctccgcctcccaggttcacaccattctcctgcctcagcctcccaagtagctgggactacaggtgcctgccaccatgcccggctaattttttgtattttttagtagagatggggtttcactgtgttagccaggttagtctcgatctcctgacctcgtgatctgcctgcctcagcctcccaaagtgttgggattactggtgtgagccatcacacctggccagaataagtactttcaagtgggtagagtgcctctatgtgtgtatgtgttttgctttttttatatagagggtgaacagaggagatctctctgacagacatttaaatagagtcctaaagtaagtgagggagtgagtcatgttagtatccagaggagagagggttgcagacagaggcagccaaggcagaagccctggcgtaggagcaagcagggcattcaagcaataataggtaggaacatgtggctgggagggtagagagtgagaggccagaggtaggaggtgagcccagaaaggtcagcaggggccagatcggccataataaggagtttggactttattctaaatgtgatagtaagtcattgaaaggtcttaaacagggaatcaatgttatctgatttcaagtattaaaagtggctgtgggccaggtgcagtggctcgcacctgtaatcccagcagtttgggaggccgaggtgggtggatcatttgaggccaggagtttgagaccagcctggctgacatgtactaaaaatacaaaaaattagcctggagtgttggtgggcgcctgtaatcccagttactcaggaagctgaggcaggagaattgcttgaacccgggaggtggaggatgcagtgagctgagattgtgccactgcattccagtctaggcaacaagagcgaaactctgtcaaaaaaaaaaaaggggctgtgagcctaggcaatatagcaaaacgctgtctctaccaaaaatacaaaaaaaaaaaaaaaagccaggcatggtggtgtgtacccgtggtcccagctacttgggaggttgaagtgggagaatcacttgaacctgaggggcagaggttgcagtgagctgagatggtgccacttcactccatcccaggtgacagagccagaccctgtctcaaaaaaataaagttgctgtggttattgtgtgtagaatatgctgtaggcagccatgggcagaaacaagaagagcaaggatcttttgtattagtccatgtgaaagatgatagttgtttgaactaaaaagcagtgggggagttgatgagaagtgatcagcgtctgtataatttttgaaggtacagctgacagatttgctgacgacatgtaagagatagagaagagtcaaggatgactccaagggctttttctctcggtaccagtagatggaattaccacatgctgaaatggggtagacttcagtagaactaggttctagggagatgataagcagtttggttttgggcatgttaaatatatgagattcctttgagatgactaagtggagatgttgaatggatagttgaataacagagtcagatgttcaagtgtgagccctgggttagagatagacatctgggagttgggctgagtgcggtggctcacgcctgtaatcccaggactttgggaggccaagacggaagatcgcttgaatcccaagatcgagaccaacctgtgcaacatagtgagactctgtcttacaacacatatatacacaaaaaccccaagaaacctagctgggcatggtggtgtgagcttgtggtcccagctactggggaggctgaggtaggaggatcacttgagctagggaggtcaaggctgcagtgagctatgattgtgctgctatactgtatgattgtgcttgggtaacagagcaagaccctgtttcaaaaaaaaaaagaaaaaaagtaaaggaatttgggagttggtaatgagtaaatgggattaaaaaaatagactatattttagagcagttttaggttcacagcaaaattgagcagaaagtacagagttctggctgggcacagtggtttatgcctgtaatcccagcactttgggaggctgaggtggaaggattgcttgagcccaggagtttgagaccagcctggacaccattgcaagaccctgtctctacaaaaaataaaacaaattagctggggtagggggtggcttgcacctgtagtcctagctacttgggaggctgaggtgggaggatcgcatgagcccaggagtttgaggctacagtgagccatgattatgccactgcatggcagcttgggtcacagggtcacagagcaagaccctgcttctaaaaaaaaaaaaaaaaaaaaaaaaaaagaatgtatcaagttcccatattcctgtgttctccctccagcctcccccactttcaacatcctgcaccagagtggtacatttattacagttgatgaaccaatattgacacctcagtaccacccaaggaccatagtttgcattaaggtttgctgctggtgttgtattgtttatggattttgacaaatgtataatgtatatgtgtatgttacacatttatcaaaatccatatgtgtacattatacatttgtcaaaatccataaaagttacaaaagtacaaaaaaagtacaatattcataaaaagacaacttgatgctcaaaaagtttcggattttggatgtttggatttgagatgctcaacccatagtaaaattcgctctttttcagaatacagttgagttttgccaaatttgacagttcacgcaagccccaccacaatcaagatatgggccgggaatggtgactcatgcctataatcccagcaccttgggaggacaacgtgggaggattgcttgagcccaggagttcaagacaagcctaagcaacataatgggacttcgtctctcaaaaaaaaaaaaaaaaaaccataataaaagtaataataatagctgggtgtggtggtgtgtgtctatagttttagctactcaggaggctggggtgggaggaagactgcttgagcccaggaggtcaaggctgcagcaagctgtgattgtaccgctgcactccaactccagcctgtgtgatagagcgagaccctgtctcaaaaaaaaaaaaaaaaaaaaaaggggtgaagaaagaaaaaaaaagatataaagcacttctgttacccacagaatttcctcatgtccatttgtaatcagcctctcctggcacctccagctcctgtcacccactgatctgtcctttgtctatacagttttgccttttccatagtgtgttataatggaattattcagtacatagccttttggatttggcttcttaaacttagcgtaatgcatttgagactcacccgtatttttgcatgagcaaaataaagggttgttgcttttagaaccaagtagtaagtattccattggatggatataccacagcttatctgtttatgtgttcaaagacatatggattgtttccagttttgggttaatatgaataaacatttatatataggtttttatgagaatataagttatcatttctcttggataaataccagcgagctggattgctgggtcatgtaagtgtatgtttaaccaggtgagaaaccgccaaactttttcagagtctctgtaccattttgcatttccaccaggaatgtcaggaatgtatgagaattccagttgctctgcattgttgtcagcacttggtgggattcttttttttctctcctttttttttaattaactgttttaaaaaattgagatatagtttacatgttataaaattcatccttttaggctgggtgtggtggctcacgcctgtaatccaagcactttgggaggctgaggtgggcggatcacaaggtcaagagatcgagatcatcctggccaacatggtgaaaccctgtctctactaaaaatacaaaaattagctgggtgtggtggcatgtgcctgtagtcccagctactcgggaggctgaggcagtagaatcgcttgaacccgggaggcagaggtttcagtgagccaagatcacgccattgcactccagcctggtgacagagtgagactctgtctcaaaaaaaaaaaaaaatttaccatttcaaagcatacaattcaataattcaatggttttcagtgtatttacaaagttgtacaattgtcaccactatctaattccagaattctcattatcccaaaaagaaacctcatacacattagcagtcagaccctatttcctccctgcccttcccagcctaggcaaacacgaatttactttccctctatatatatgcctgttctggacatttcatagatatggagtcatacagtaggtgactagctgctttcacttagcatgctattttcaaggttcatctatgttgtacgttactgctttttgtggatgaataattccattatatgagtataccatattttgttttcccattcatcagttgttgggtatttacagtgtttcttctttttgggtattgtgagtacacatttgtgtggacatatgattttacatcatatgggtatatacctaagatggaattgtcagatcatatggtaattctgtttaaccttttgaggaactgctaaattgcttttcgtagtagctgcaccattttacactcccaccagcaatgggaatcctgtttgtttttattttgaagagatgggagtcttggtattggcccagactggactcaaactcctgggctcaagtgattgtcctgcctcaggcctcctgggtagttgggactgcaggtgcataccaccgtgcccagctattttttacattcaataagaagtaaaattatcagctgagactgagatcaggacagggagggcttaggtttgaggaaagaagataaggtatgaaatatttaggagtttgcactccctcctcaggctccactttactcagtagctaatgacaggcctcaaactcctggcctcaagttatcctcctgcctcggcctcccaaagcactggggttacaggtgtaagctaccatgcctggctaaaaacttttttgatattaattttcctggctccttaaaggtataagacattgaattaagaagagtgcaaaattgctactctataattaggttaattatttttagagagagggtcttgctttgttgcccaggctggagtacaatggctatttacgagtgccatgaaatacactacagccttcaattctttggctcaagcagctctcttgcctcagcctcctgtgtagttgggattataggcatgcactatagcacccagctcttacacttttattttaaaaatactttttgttgagttttaatttatagtagagtgtataaaccctaaatgtgtagcttgatgaacttttacatatgtatacacttctatagccaccacccaaatcaagatatggaccattatgggcactccggaagcttttttgtccctctcctacccccaaagagaattactgtttaatacctgtttgcagatatgcattttatatatgtatgtatgtgtgtttgagacagtttcgctcttgtcccccaggctggatggcagtggcacgttctcggcttactgcaacctccgcctcctgggttcaagtgatctcctgcctcagcctcctgagtagctgggattacaggtgcccgccaccacactcgactaatttttgtattttcagtacagatggggtttcgccatgttggccaggccgggctcgaactcttgaccccaggtgatctgcccgcgtcggcctcccaaagtgctgggattacaggtgtgagccactgcacctggcctagacatgcatttaaagtgagacccatcagcatgttgagtgttttctctagccacatttagctgtctgggtacaggaatggagaatgtggagtctgaaataaccagggttgggtggcagttgtgatgaggaagagagtcgccagtaatttgagggcatatgcaaggaagtgaaattaaagaatgagaagatttccaggaagagagtggcagggggagaaggcagaaggaataacatcagcaaaaatattcagggcttgaaagaacttggtgtgttctgagaatccagggaggtaacaggagtggtgggagattgaactgaagagtgaaaatttaagcaggagagagacatgttttgatccttcttagtaacagaaaattggcagtgttcattctgtcataagatatttgctgagtggctctgtatcaggcattctgctgggtactgatagaaggggtttaggggtgatgtgtacatactgactgttcagttgttgctggtaagaaatgattgagatagagaggaaagataaatttaagacctttcttatatcagatgttgattaatggaagtggtgaaggggtagggaaagagttaaggcattcaaaatagcagtttttctgcagtttaatagtcagccttttgttttttactaaatatatcttccatccccatctcctctccagcaaaggctggtgatggcttagaatgttccttttgtgcatagaagtattttgcttctggtatgtgccctgagccaggaatagaggcaagctctgattttttttcgctcttgtcgcccaggctggagtgcaatggtacgattttggctcaccgcaacctctgcctcctgggttcaggtgattctcctgcctcagcctcccaagtagctgggattacaggcatgcgccaccacgtctgggtaattttctgattcttgaagtaaaatgagtgctgtatgtttgcagacaaactgtttatatagcaaagaatctggaagcagtctgaatgcttaacctctgggggaaagttaagtcaaattctgggctagccacgcagttaagtagactattacatggctaagacaaaagacacccatgtggatgtggtgactgcaggaatgtttacatgtggagtccagttaagagcagaaggctcatagccgggtgcggtggctcacgcctgtaatcccagcactttgggaggctgaggtgggtggatcatgaggtcaggagatcgagaccatcctggctaacacggtgaaaccctgtcactattaaaaatacaaaaaattggctgggcgtggtggcgggtgcctgtagtccagctactcgggaggctgaggcaggagaatggtgtgaacccgggaggcggagcttgcagtgagccaagatgacgccactgcgctccagcctgggcaacagagcgagactccatctcagaaaaaaaaaaaaaaaaaagcagaaggctcttcaccgggtttagagttagatgtagatatcgatcttgattgtgcctcttcctagtcattctctttgaggctccatttccatgaatgtaaaaagggggcagtaataataatgactccttaagtcttcatggcatgatcaagtgagataccttagataaagatagtttacaaaccctagagtaagctgcactcattagttttatttatttatttatttatttatttctgagacagagtttcgctcttgttgcccaggctggagtgcaatggcatgatctcggcccaccacaacctccgcctcctgggttcaagcaattctcctgcctcagcctcccgagtagctgggattacaggcatgtgccaccatgcccaggctaattttgtatttttagtagagacggagtttctccattttagtcaggctggtctcgaactccaggcttcaggtgatccgcccgccttggcttctcaaagtgctgggattataggtgtgagccaccgcgcccagcctcattaattactaatagccatgtgggtgaacactgatgagttgtagtgggaattcggaaggaaattgtcatcctttctgtttttttctccccggccccatgatgtttctttagttagtatttctggtatataggggggaacaaaacagattcctgccaagcactgtctggctgctctagtttaagcacgtgcacggtatgtagtattaggcagcttaattttacacagatgcagcaagactctgagcggcaagccttcctggggcttaaggtcatatagggcaggcatgtcaacactgtttccctgaattagacctgtactgttctctgccttctggctgtgcacatggagtcatgccagcagtggcagtgctttactgtcttacagccctctctctcccttggtggagccctaggacatgttggcttatcttgtagcttagagcagtgtttctcaaacctgaaaacatgaggactggcacctctaacctataaactattgatagactccatttctagataccaaagcagtctagcaaaatgcaactttgttagctacttagtgctgtgtaacacattttctcaaaatttagtgtcctaaaacaataaacatttattattctctaggtgtctatgggccaggaattcaggagcggcgtaatggggggttgagggggcttctggcccaggatctcataaaggctgcatccaagggggctcactcacagggctggcaagttggtgctggttcctgacaggtggcctcagttccttgtcatgtgaacctctccatagacatctagaatgttctcacgatgtagcacctgacttaccctagaacagggaatctgagagagtgcagggcagaagcagcagtgctttgtgtatatgcttgtggtaaaatacatacaacataaaatttagtattttaatcatttttaggtgtgcagtacagttctgtagcgttaaatacattcacactgttctgcaaccattaccagcctacttctccaaaatattttctttctttcttttttctttttttcttggtgatagattctcactctgttgccaggctggagtgcagtggtgcgatctcagctcactgcagcttctgcctcccggtgattctcatgcctcagcctcccgagtagctgggattataggcttgtgccaccacgcctggctaatttttgtatttttagtagagatgatgtttcaccatgttggccatggctggtctgaaactcctcacctttggtgatccacctgcctcagcctcccaaagtgctgggattacaggcatgagccactgagcctgacctaaaatttttcatagtgagataaaatctcactatgttgtttatgttggtctcaaactcctggccttagccgtgcgccatggctcatgcctataatcccagcactttgggaggctgaggcaggcatattgcatgagcccaggagtttgagaccagcctaggtaacgtggaaaccctgtctctcctggcctcaagcaatcttcctgccttggcctctcaaagtattgggattataggtgtgagccaccacgcccagcccaagattttttctttttctttttttttttgagatggagtttcgctctgtcacctaggctggagtgcagtggtgcgatctcagctcactgcaacgtctgcctcctgggttcaagcagttctgctgcctcagcctcccaagtagctggggctacaggcgcatgccgccatgcctggctaattttttgtattttagtagagacggggtttcaccatgttgcccaggctggtctcaaactcccgagttcaggcagtccacctgcctcggcctcccagagtgctgggattacaggtgtgagccaccgtgcccggcctgattttttcatctctccaaactgaaaccctgtatctattaatcagcaactgcctcatcccttctccccttagctcctggtaacctctattctgctttcattaatctggctactctagataactcagatgaatggaatcatgcagtatttgtccttcaagtggcttatttcacttagcataagtcctcaaggttcatctgtgttgtagcatgtattagagttttattcctttttaaggctgaataatattccattgtatggatataccacattttatctattcatgtattagacacttgggtggctttttgactactgggttgtcttttgactgttgtgagtaatgctgtgtgaattctggagtacagacatctgtttgagtccttgtgttcagtgtttttggatatatacccagaagtggaattgctgcagtgcttttttttctttttcacatcaactttatagttagataatccatcactttattaattcagaagtttgctttttttttcccttcaactttttttttttaagttctggggtacatgtgcaagatttgcaggtttgttgcataggtaaacttgtaccatggtagtttgctgcacagatcatcccatcacctagctattaagcccagcatccattagctcttcttcctgatattctctctcccctgtcctgctgcagtgctttttataacccagctttggaagtcccacaccatcacttttgccacattctacttgttagaaatgaggccatattcaaggataaaacgattaaaatctaccttttgaaggaataagtgccaaatctgcagacatataaagttgtcccagctactatgtgggagtgattttataatgccaggttagttacaaatatacacactaaagttatttctttcttccttccctccctccctctcttcctccctccctccctcctttccttctcatttatttattttgggtctcactctatcacccagggtggagttcagtagtgcgatcatgactcaacacagcctcaaccttctgggctccagtgatcctctcacctcagcctcttgagtaactgggactacaggcatgcatcaccacatctggctaattaaaaaaatttttttttgtacagacagatggggtctccctatgtttcccatactgatctcaaactcctgggctcaggggatcctccttcagccacccaaagtgctgggattataggcatgagccattgtgctgggctgattaaatttttttagaaatagggtctcactttcttgcccaggctggagtgcagtggtgttgtgatcatagctcactgcagcctcaaactcttgggctcaagtgatcccccaactccaacctcttaagtagctaggactacaggcctggctaatttttaaaactttttgtagagacggagtcttcctatgctgcccaggctggtcttgaactcctggcctcctgccttggcctctgaaagcactgggattacaggtatgggccactgcgcccagccttacacactaaaattttctagtagttcttgattatatggtggtcatctggtatctcaacgttcttcatgtcattgcccacttgtaacccatttgtggtacctcagctgggaagctctggtaaagagggtccagattacagaaaagcacaatataatattcttcatccctcatggagaccttgtggaccagcagctctgtgttcaccaacacgcagtggtccgtggactgctcttggcaaacattcatttagggctcagcagcccatccataagatcctcctggcccctcaaacggagttgttgtttcctctatccccttgaatttccttgtcctcttttttgcctgctttcctctgtactatgctgatttactcctattacatcttctctcagaaactctccccagcttcactgcctctttgatcagctggaaaatgcctactcatctttcagaatggagatcaagtgtctcctcttccccagggttgtcttgggccctcctctcactcgatccccttcctctccctctccccttttgcacctctgtatcttactctaccttaaggagtcctctgttgttgcacctggtatactttattacaattatttgtacctatagacatacttagatacttttattcccccagactatactgtagtaagtaagagacagatgcctctagcagtgcctgttgtctcctggggaagcaggccataaacacaaacaaatgaaataatgacagattagggtaaatgctatgaaggaaacatataggaaactgacacagactggaaagaaatgggggctacttgagatagtgtagtcagagattctgaggctatgggaggataaggatgttgcctgggaagagtgggcagggattgttgtttcaggtaacgggagcatactcggtatgggaaggtgtgtggtgtgtttgaggaattgaaagtctactgtgtgttgtaacgtagggcctgtcatcctctgccagttgctgtgatcatgcatcttaatagatttggttctggccagatgtggtggctcacgcctgtattcccagcactttgggaggccaaggcaggtggatcacgaggtcaggagttcgagaccagcctggccaacatagtgaaaccctgtctctactaaaaatacaaaaaatgttagctgggcgtggtggtgggcacctgtagtcccagctacttgggaggttgaggcaggagaaacacttgaacctgggaggtggaggctgtagtgagctgagatcacaccactgtactccagcctgggtgacagagtgagactccatctcaaaaaaaaaaaaaaaaaaaaagtagatttgattctgtatttctaaaccctaatatacttcctggcccagagcaggtactcagaaaatgtttgtggaattatggttcaatgaatttttcttctgctgatttctgttcattctccttgtccttttccatttgacattggctatactggtcttctgtggcttcttggttggcttagtgaccagttatctgacttgcttaaattaagcttattacggtaaccttatttattatgaatttttgcttatctgtcctttccaggttgaattttagatgagagtttttgatgctttttggcctttggaaaacagttttgtgactaattttgtcatggtgaccaccatgtgcatatatcccctccaaattaagagttcccatactggggtatgtttgtcctcttgacatctacaacatgaatatcactggtttattttgatgattcatcttggtttgtttatatatttctattgctgttttgtggctccagatctttttaaaaattacatctggtgaacctttattgaatgtctaatatatgcaggataccctgggggagattcagactcttgatctctgaaggtttgatccaaaggctaagtcttctctgaaccctttcccaaccctctagttagaaaaaatgggactctgatgaaaaagtttaatgtgggctttagaatgaagggttaaaaaaaataaaaaatagaccaggcacagcggttcatgcctgtaatcccagcactttgggaggctgaggcgggcagatcacgaagtcaggagttcaagaccagcctggccaacatggtgaaaccccgtctctactaaaaatacaaaaattggccaggcatggtggcgcacacctgtaatcccagctactctggaggctgaggcaggggaattgcttgaacccgggagacagaggttgcagtgagccgagatcatgccactgtactccagcctgggcgacagagtgagattccgtctcaaaaataaataaataaataaataaataaaaaggcgggagggtttattcaagtgctttagaagggggcagggaagagcagcagaaacccagactgtccagcctgggctggacatggaggagagataatgcctctcttctgtctagtcctggttatgggatataggcaggctggttcattctacagctatggttttttttttttttttttttttgagacggagtttcgctcttgtttcccagtctggagtgcagtggtgcgatctcggctcaccacaacctccacctcccagataaagcaattctcctgcctcagcctctcgagtagctgggattataggcatgcgccagcacacccagctaattttgtatttttagtagagacggggtttctccatgttggtcagactggtctcgaactcccaaccgtgggtgatccgcccgcctcagcctcccaaagtgctgggattacaggtgtgagccactgcgcccagccagctatgcttctttttctctcctttcttcctgagatccagagtgttcctgatctttttgcttgtggagaggagtgggaaatctcatggagctcaccaaacttctctttgggctcttgccaccctaggggctctgatgattggtcatctattctgtgtctccaggacctagcagtttgtttgtctcataatacaaactcaggaatgtttgttgaataatgaagttcatagggcatagttcctgccctgtaaagtgcttagcagccttgtgtttatattagccatttaaaaatcttgtttgtgacttgagtttgaaacatttttgttgactcttgaactctttcttctgaggaaaactattgatttttgaacatttaagttgtacctgattatcatttcaaactctcttatcagtttaggaaaaattgactcaagaagaggtaggaggccgggtgtggtggctcatgcctgtaatcccagcactttgggaggctgaggcgggcggatcacgaggtcaagagattgagaccatcctggccaacatgctgaaaccccgtctctattaaaaatataaaaattagctgggtgtggtggcgggcgcctgtagtcctagctactcaggaggctgaggcaggagaatcgcttaaacctgggagtcagaggttgcagtgagctgagaacacgccactgcactccagtctgggcgacagagcgagatgccatctcaaaaaaaaagaagaggtaggaaacttgatcagactagtaaccatagaagtgatgggaaaggtagataaagaactaccttctgagaaggccctcagagtaggtggtttcatagaaaatgaaataaagcattttagtttgttgtatgagattatcatagcctaatactgaaactgggcaggaagggcataatacaagaacacttggacagatctcatttataagaggtacaattcttgtcaataaaatcctggaacaccaagtagagacttattaaatgaatgatgcatgaaaccaaatatgatttattctagcagagtaatgataacttaaatttaagaaatctatcagttcattatatttacagaataaaagagtccgggcacagtggctcacgcctataatcccagcactttgagaagctgaggtgggtagatcacttgaggtcaggagtttgagaccagcctggccaacatgatgaaacccgtctctactaaaaatacaaaaaattagccaggcgtggtggcgtgtacctgtagtcccagctactggggaggctgaggtgggagaatcacttgaacccgggaggcagaggttgcagtgagccaagatcacaccactgcactccagcctgggcaacagcatgagacttcatctcaaaaaaacaaataaaataagataaaataaaagagaaaacttttataatcttcttgacaaaggctgaaaattctaaaaatttattattacctgttttttagatgggggtctcactctgtccccagagtagagtgcagtggcacaattatagttcactgcagctttgaactctttggctcaagtgatcttcctgcctcagtcttctgagtagctgggacaacaggcacacaccactactcatagcaaattttttttttaactttttttttttagagatggggtcttgctgtcttgttcaggctggtctcaaactcctggcttcaaagtgatactctcatcttggcctcccaaagtgctgggattatagacatgagccactatgcccagccaatattcttattttcctcttctataacacaaaaggtatcataagatatgcactattctgtagcttgttttttaaaaacttaatgtgtcatggaagtctttctgtatcagttcatagagtgtgtcttcattctttcttgtggctacataatatgccattttgtgggtgtgccatagcagcacataaacataatattcatgaagctatcggttgatatctttaaaaaagttttttaaacttttaatttgccgggcgcagtggctcacgcctgtaatcgcagcactttgggaggccgaggcgggcggatcacgaggtcaggagatcgagaccatcctggctaacacggtgaaaccccatttctactaaaaatacaaaaaattagccgggcaaggtggcaggtgcctgtagtcccagctactcgggaggctgaggcgggagaatggcgtgaacccccggcggggcagagcctgcagtgagccgagatcacaccactgcactccagcctgggtgacagggagactccgtctcaaaaaaaaaaaaaaaaacttttaatttaaaagtatttattttttggctgggtgcagtggctcacacctgtaatcctagcactttcagaggccaaggccagcgatcgcttgagcccaggaatttgagaccagcctgagcaacatggcaaaaccccgtttctacaaaaaataccaaaaaagtatcttagccgagcatggtggcgtgagcctgtagtcccagctactcaggaggctgaggtggatcacctgagcctggtaggttgaggctgcagtgagtggagattgcaccactgtaccccatcctgggtgacacagtaagaccctgtctcaaaaacaaaacaagaaacaaaaacaaaaacaaaaaaaacacaaaaccccaaaaagtacttattttttacttatacaagtaatatttaactaaatttttaaaaaaattcacactaaagcaaaaatctcttggttattcctaatccctatctcctcctaagagctaatttttgttattagtttgattatctgcccctttctggccagtattcccgctggttggaaatgtaactcccagctgcaatgttagtttggaaactagagtctcatcagtggctcttagttacacagggaagctagaaattctctcttccttttctgcctgtacaaattccattcacatctcttttgttaactctgtctcatcatcttcagcctgctttatggttgtccatatatttaggttgaaccagataaaattgctattttggtaggtaaaaagcagttgattatcagcaattaaatgtggttcaacctaatagttttaaagcctaatccatttatgtgtctagttctcctcaagggcaggggccagaacacatgtttgtataatcccttccaagacttagaattggctggtcagatcaaaagcacttaataaattcctgttgactgatgaagctaagctgtcgccaaggcaggcagagttgtgatccactaaatcttaccaggttgatctctaagatggtttttgcagcctccctcttctctgaaatgtaattgggtccccaccgccgtaagtgacttgcatctttgtcacactttagggaagtggggaggaccacttaatctttggaaaattttgcgccttggctactattgagcctcttggaggggtttgtttaggtctgcagagagttggatatgtgtgcccaataaagttttttttgaatgagggagaagctttacattagctgaggacgtaaagacccttcagagtgagtggagttgctggcctaggagttcacacttgattctatgaatcctgacttccgaccagtgcatatccaaaagaatttaaggttttccctgaggttgccaacttttaattttgccaaataaggacatttaaaataagtatgtaattatgtacttttaatagttaatatgtgctcatggtacagcattcaaaatgtccaaaaggatatacagcaaataaaatgagtctcatgcttcctctccagttgcttaaaactatccagttccccttccgggaggcaaaccgggttacttgatcctccttcccgaggtagcccacgcatttaaaaacaggtatgactgtactggctctctcccttcccccacataaatggtagtgcattcaaatactgtttgacatctttgagtttacctcccacatttcttagaaatcttttaaaatcaatacattaaaaaaataaagtaaaatcaatacatagagctgccttattctttttgaaggctgtgtgatattaggaagggtattaaaaacagttgttatcgttttaacttagaaggtatatttaaatactaaaagttagaaagaatgcgatttcaagcgggacgtggtggttcatgcctgtaatctcagcactttgggaggctgacgcaggaggatacttgagcccaggtgttcaagaccagcctgggcaacatagtgagactccacctctacaaaaaaaaaaacccaataaattagctgggcatggtggtatgagcctgtagtcccagctactctggtggctgacgtgggaggatcacttgaggtcaggagttcaaagctgtagtgtgccatggtggtgccactgcactccagcctgggaaacagagcgagaccctgtctcaaaaaaaaaaaaaaaaagtgatttccgtgtaaagaaaatttcctgccttagtccaaggaccctgtgtgagaaagctgttgctagagatagtaaaccattaaagaaagtggtttgaagccaggagcagtggctcacacctgtagtaccagcactttgggaggccgaggggggcggatcacgagatcaggagatcgagaccatcctggctaacatggtgaaacctcgtgtctactaaaaatacaaaaaaattagccgggcgtggtggcgggcgcctgtagtcccagctacttgggaggctgaggcaggagaatggcatgaacccaggaggcggagcttgcagtgagctaagatcgtgccactgcactccatcctgggtgacagaacgagattccatctcaaaaaaaaaaaaaaaaaaaaagaaagtggtttgaataggaatgtgttaagacagattgtgttattttagagaggtttactagcctcaggtaggctgaatgaatgagagggtaagagatatataattgccatattgatgtccttctccccattttacagagaggagtggatttagggaatcctctcttgtctcctacaattgtactatttcatttgtcagatcagacaattagccagtctgttgtcaagatatcttgtatttatagcagctgtcatttggattggagtaggaagactagtttcagggctgtttatgtcttttgttaatatttttgagcaagtaaggtatgcatagtagcaattaggaattatggaaaacatacccttccagtcctctgtgaggaatacacacatgaagtgatgggggcctgaacttgaggagtgaaattggaataggttgctggagtctgagaatgttggaatttaaaaactgacagaatacatgacctttgggaagaataagaggagtggaattcatttgctaaacatttattgagtacctagtatgtgcaaagtactgcaataagttaatgccaagcaaactgccttagagggtgctagtgtgggttgaaaagtacacagtatacagacacaagaaagcaggcctgttcatttaggtaggtagcatgtgtttattaggacagcactgtactaggtgctggatataagaaaggaaggaagtggtacaaaccaggttgcagggagaaaatacagatagaatgtaaactttttcagtctagaatagctatttgattaatacaagtgttttcagagaaaaactgcatacaatatttttctttatttttaaccgtttattttttggaatgagcaatacctttatatagttgaaataaaaaggtattataaggtatactgcaaaaagtctccctcctatttttgccccttcccacctcttatccagatacctctcttgtgtcaggaataaatgctggaaacagaaaccagcccgagtattttaaccacaaaaggatttaacgtggggaattgggtacttttaaagttgttggaagggctggaagagtgggactcaaggaggctgcccttagggtatcatcttgaaaggcccacaatcgtagctgtgatctggtcaggaagtcactactggcactgccatctgcaccactgctgcttgacatgcatgaaactgatgattagacattaggctctggcttattgcagaccagcagcagcagcagcagcagcaacatctgggagcttgtgagagctcttaggccccagcttggcatactgaatcagaatcttcatttcaacaggataccttgatgatttacatgtgtgtggaagcttgataggccttgtactggacctggccactaacccaagggtctttatgaccttggccaccaattgtaaggaagtcagggaaatgtagttgttgattttcctaactctcagtctagaaagaaggttgaatggaggttgaaagaaaccatctactgaactgaccacacttttccacaagtaacctttgttgtttcttgggcatccttccagatactttatgcatatataagcatatgtgaatacatatccttttttctcctctttaaaaagtaagtcaggtgtggtagctcatgcctgtaattccagcatttggggaggctgagccaggatctgctatcctgggcagatagcttgagcccaggagtttgagaccagcctgggcaacgtaacagaactccatctctacaaaaaatacaaaaattagcactgtatggtggtgtgtgcctgtagtctcaactacttgggaggctgaggctggagggacacgagctggggagagggaggttgcagtgagccgagatcacgccactgtacttcggcctgggtgacagagtgagaccctgtctcaatcaatcaatcaatcaatcaaaataaaacgaaacaatagcttagcatatacagtgttctgaatcatataactgtatatcttagaagagctttccatatcttgacagataaaatcatcttgttctttttaataaccgcgtagtataaggctgggcacggtggctcatgcctgtaatgctagcactttgggaggctgaggtgggcggatcatgaggtcaagagatcgagaccatcctggccaacatggtgaaatcccgtttctactaaaaatacaaaaattagctgggtgtggtggcacgtacctgtagtcccagatactcaggaagctgaggcaggagaatcacttgaatcagggaggtggaggttgcagagagctgagatcgcgccactgccctccagcatagcgacagagcgagaccctgtctcaaaaaaacaaacaaacaacaaccaaaaaaactgcacagtattccattatattgcttataaatgcttaaaattgagactgtctgatacagtctgggttgcatggtcattctgatttattggcacatgtaaaatctaatctagttgttaaatccttaatgttttcttcctgcctcttgtgtgctcaagtcttctgtgtatgtcatcttgtttaatccacactacaacccagtgtgcttcttccactttacatgagggaactcaggctctgaaagtttaatttaatggttcataaactggccgggcacagtggttcacccttgtaatctcagcactctgggaggttgaggcgggcagatcacctaaggtcgggagttcgagaccagcctggccaacatggcgaaaccccatctctactaaaaatacaaaaattagctgggcatggtggcgggcgctgtaatccccgctactcgggaggctgaggcagggagaattgcttgaacccaggaggttgcggtgagccaagatcacaccactgcactccagcctgggtgacagagcgagactctgtctcaaaaataaaataaaataaaatagttcataaactaaggaatatgcaggttaggatttggacctcaagtctgttaccctccataatttgtgatttgacccaactacacagagtctctaaacggtaggcctggtaaccttctcctttgggaagaggtttggaaatgtaccattatggatatttggatatttggggtgggtattaaaggaatgccaatttttttttttctgactcaggtatccagctcacatagaagacattgactacgaggaaggaaaagtactcatccatttcaagcgttggaaccatcgttatgatgagtggttctgctgggacagtccttatttacgccctttagagaaaatacagctgaggaaagagggcttgcatgaagaggatggatcttctgtgagtaacaaatctgggaagttctgtagtatgcaaggtcagccattgggctgtttgtgtttcaatctttgatgttagtagcagctggagaccagttcttatttaggcctatagttgtaaccctgagatctctatgacacctggggctcttgaagaatcccaattttgtttgtttgttttttgagacggagtctcgctgtgttgcccaggctggagtgcagtggtgcagtctctgctcactgcagtctccacctctcgggttcaagcgattctcgtgcctcagcctccctagtagctgggattacaggtgcccaccctggctaatttttgtatttttagtagagatggggttttgccatcttggccaggctggtctcaaactcctgaccaattttacggcattgtatccctaacttctagaacactgcctggcacattgtagatcttctgatcttttgttaagctgtctggtcttttgttaagtgatcattctggccaggcgtggtggctcacacctgtaatcccagcactttgggaggcggagacaggcaaatcacaagatcgggagtttgagaccagcctggccaacatggtgaaaccccacctctactaaaaatacaaaaaattagctggatatagtggcgggcgcctgtaataccagctactcgggaggctgaggcaggagaatcgcttgaacccaggaggcggaggttgcagtgagccaagatgatcatgccactccactccagcccgggtgacagagtgatattccatctcaaaaaaaaaaaaaaaaaaaaaagtgatcattccatgtagaacgttgtactaagtctcatatgcaaggtcttcttcttttgagacagggtcttgctctgttgcccagacgggaatgcagtggtgcaatcatggctcactgcagcctcaatctcccaggctcaagcgatctttccacttcaacttcccaagtagctgggaccacgggcccaccacacccggctaatttttaaatttttttatagagacagtgtctcgtattgttgcccaggctggtcttgaactccgggctcaagtgatcctcccgccttggtctcccacagtgctaggattataggtgtaagctcgtcctgcagagtcttttataagcccttaaagaacttggaattgattggactgtattccatttttctaaattttatctctatgcctggagcttttactgacttcaaaatgcagtatgaagtattagttttaaggtttttttgttttgttttgttttaagcagtgaaagcacagatttattgaaatgaaagtacactccacagagtgggagcgggctcaagcaagtagctcaagagccgtttttttggtttgtttttgagacggggtcttgctctgttgctcaggctggagtgcagtggctcgatctcacctcactgcaacctccatctcctgggttcaagcgattcccctgccttatcctcctgagtagctgggactacaggtgcgtgccaccacacctggctaattttttgtatttttagtacagatggggtttcactgtgttagccatgatggtctcgatttcctgacctcgtgatccgcctgcctcggcctctcaaagtcctggcattacaggtgtgagccaccgcgcccagccggttttttttttttggttttttttttttttgataatgttgtccagctttatttttgctttcttgccaaagatttgtcaagctcctcactctgtcattataaaattcccaccctgagaatctcccatttttcttcaccatcaccacacacacacacacacacacacacacacacacacacacacacacacaggctgaaacaataaaatataaagttcatcctaagaagaagatatcgagtccaaagagggttatcaactttagaaaagaagcaaagaaatcataaaataatgatattttaagattacagattaagccctaatttagaatatttttagaaattttatcatattaaaacaagggtgaaggcactatagactcttgttttttaactaactttatttaaattagctatacccattttaagtgtatgatttcataagttttgtgtaataagcttaaatttaataagcatttaaatttgtgatataaaaatcacccattttaaactgtatagtttaataagttttgcaaatttatattgtcagatagccactgccatatgatacacaatattttcattatgacaaaaagaagctctccctcaaattgcttttcattcagtcttcaccagccagtcctggaccagttctggaccctggcttgccactgatctatctattttctgtttatagtcctatttttgtttggtttttcatttgaaataaaatcatactgtatgtaacatttcgggtctgacttacttcaattagcatatcttttgaagcttcatttatggtgttttttttttctgttcctgtaataacagtttgttttatttttttaattttatttattaatttttttattatactttaagttctagggtacatgtgcacaatgtgcaggtttgttacatatgtatacgtgtgccatgttggtgtgctgcacccattaactcatctttttttgtttttttttaaagagacgttttcttgctctgtcgcccagtctgaagtgcagtggtgcagtcttggcttaatgtagccttgacctcttgggctcaagcaatcctccttcctcagcctcctgagtacctgggactataggcatgtaccactgtgcctgactaattaaaaaattttttttgtagagacaaggtcttattatgttgcccaggctggtcttgaactcctggccttaagggatctttctgccaaagaaggaagatccttcgtacctcccaaagtcctgggattataggcgtgtgcccttgtgcctggctagttttaaggtttttaaacaggcattgagacatctataatggtcctgctgcttttggatctgactcagactcagccctgccttctatttttctttctttttttttttttttttgaggcagtcttactgtatggccgaggctggagtgcagtggcatgatcttgactcactgcaacctgtctttcgggttcaagtgattctcgagtcttagctttctgagtagcttggactacagacgcatccaaccacacctggctaatgtttgtatttttagtagaggtgggagttcatcatgttggccagactcctggcctcaggtgatccaccttccccagcctcccaaagtgctgggattacaggcacgagccactgtgtccggcttattttctgttttaaccctattagggaacttgaactattgctggccttttttttctttttcccaattaaggattattcagtattgttccatttgacttttcagtgttcattctacaaatttttttttttttttgagacagagtctcactgtatcacccagcctggagtgcaatggcgcaatctcggctcactgcaacctccacctcctgggttcaagtgattctcctgcctcagccatcgagaagctgggattacaggtggccgccaccacacaggctaatttttgtatttttagtagagacggggtttcaccatgttggccaggctgatctcaggtgatctgcccaccttgacctcccagagtgctgggattacaggtgtgagccactgcacctggcccattgtacaaaatttatcagtgcaaactgtgtgctgggaaaagagtataaaatattaaaggtgaatggttgctttccctggcaaaagaccctttagaagtgtagatggcattaaatgctgcttccctgagtatgaagtagcctcatatcttctgactcctatactggatgtgtattctagtagtcctggcctcttagactcattttcagaatgtatgctggttagggtggaattatcatcagtgctgttctgtgcctgcccagacctcttgggcttattgaggtcttgtgtcccagcccttttgttttgactcctgtcttagtcttttctgtgttgctataatagaatacctgagactaggtaatttataaagaaaagaggtttgtttagctcacaattctgcaggctgggaagttcaagtgcatggtactggcttctggcatcagctttcatgctgtgtcatacatggtggaaggtcaaaaagggagacaagtgtgaagagagggaccaaacagaaggagacttgctttgtaacaacttgctttcttgggaatgaatccattcccaggagagcgagaagtcactcctgtgagacagcattaatctattcatgagggatctgctaccatgacccaaacacctctcataggccccattttcaacactgctgcactgaaaacgtttacttttggtgaggacaaatgacaccgaaattatagcaactcctagtgttgaacaacagaaatatcttcctccatctcaacagctactttcccttcacactttcttatcaatcccagcttcttttatgagatctggtatgtcctgtatgtcctgtgaaattaggttggtaacaggatcttttttttttttttatgttttttaggaatttcaaataaatgagcaggtccttgcttgctggtctgattgtcgtttttacccggccaaagtcactgctgttaacaaggatggtaaggcatttgagttgtagttgtttttactcatgacttaggtggtggggggggatgtttgtaatatcagagcttgatagtatattttcagtatttatttactgcctaggtatccgctttattcaagttaatcactatgtcaggagttgggtagaaattataagtgtaaagaaaactggacaaaaaagatagtttgactttttaccccctgaatttcagtcattgttttctaaaacagtcacagttcatctgtcactctgcctggaagtatgcaggtacttgctgtctaggagttcctaatataattgatgacatagtcctgaatatttgtgaatagcttagaaattaaatgaacactaacaaactttaaaaaatgtgctttctagatgcaaggtgactgagggtggtctgtaacattggagttgctagtggaaactgggatgccggaatttagagcactgagttgggtttcatttgccagagttgaacatgtgaagagacaggatggggaacttgactaatagaggctcaattttgctagtaaaagggcagacaaagagttatgaggataatatgtacggtcaggatcctggcacctggagaatagagtctgggtcccagtgataccattgtaagcacattccactagggtgtgtgtggtctccatgatctctgaagtgagtgtttagggaagtcaggcctcttgatgccactgtagggttgactattaggccagcctgacttttcatttgatgaagttattcagatatttattaatactctgctaactgctgggcctcaggctgaccaagttttgtctgagaatgattttttttttcttgttcttttttgggacagagtcttgctctgttgcccaggctggagtgcagtggtgccagctcagctcactgcaacctccatctcctgagttcaagcgattctcctgcctcagcctcccgagtagctgggattaccaacgtgcaccacggtcagctaaattttgtatttttagtagagacggggtttcgctatgttggccaggctggtctcatgtgatccacccacctcggcctcccaaagttttgggattataagcgtgagccaccatgcccagccgcaactttttagaaaagtatttttcaggccaaacacgatggttcttgcctgtaatcccagcagtttgggaggctctcgtgggaggatcacttgaggccaggaatttgagaccagcctgggcaacatagtgagacctcatctcactatgaaaaaaaaattagatgagtgtggtgacatgttcctgtagtcctagctactcgcatggctgaggtgggaagatcccttgagcccaggagtttgaggctacagcaagctatgatagtgtcattgtactccagcctgggcagcagaacgagactctgtctcttaaaaaaaaaaaaaaaaagtcttttcagttgtgcttcctccataagctaaaattataggagggagagtctcgaggctatgatagttcctaaaatggtcatttgcaacgctaatatcttgtttctgaagctccatattctgtccagtgaaatttagttaattgaaggacatgaaaatgaatggaaatttctgccaaaacctgttgtcctgaggttcttgggtctgaagtcctgtattatgctgacacattgactggtttttgggactaactggaagagggaggagaggatatgggagaggggcaatcctgaaacagaaagttagtggggcaggctgggtagtactattggccacccagattgtgaaggaaagctagcctttgtaggagctcagatctatgtctgattcagagatgaagataattaatgcctctaagaggggtgggaaggtgtcttggtggaggcaatgaaggcttagtaatctactgtttagatctaatacctgcagagcccagagcttggcatcatgaagtaaaacaaaagaagacctgcttcaaagtagaatgaagtaggtgctgaaatagagctaccaggaggaggcagggcaggatggtgcaggttaatcatggtaggcacctgtctctataaggttttgtgtttgtgtgtgggatggatcagaaactctttgaaataatgatttcaaaaatgattaggtttggattagagctgatggtcagtttgtgcttcatcacgattcactgtgggattacttgtgggattgggagcgacaatgctagtctctcttttcactctttccttggtattttctgctgtgcctcaggttcattcgtagcagtggccaccagcttaatggccctgcgaggagaagctctgccggcaaggcggcccctttatttcctgtaaatgtcacttatgtcttgttggtgctgccaggaggaggcaggggatatagtgaagtcatgccttgtagatttatctttagaaggcttggtctgattttcttgccactcttaatctccttggatgttttgctaaagctgagtgttgagcaggctggtgggtggggactgtagccagagtgtggaagtggcagctgctggcactgaggagtctggcatgattgaatcagaactaaataacaactttagtttcttaaggaagtctgttagcactcggaaaatagggcatataatgccatattatttagcttttttcacctggagtggttcttcagcagtggagattaagcattatttagtacgaaggcagcggcagttggtagccttgttagaccctcagtctgtgttgttacaaaagacagtaaaagatgggtttctactttcagggaatctttgtttggaagccatctctggtgagctgacctcacctctttgctggggctgcttagcttccccctccgtttttttttttttttttttttttttttttggtgacagaatcttgctctgttgtccaggctggagtgcagtggcacaatctctgctcactgcaacctccacctcctgggttcaagcaattctcctgcctcagcctcctgagcagctgggactacaggcacatgccacaccacacctggctaatttatatatatatatatatttttaaggtttcaaatgtactttatttcttcattaatgccatatcttaatgggtacacagtgctttaacttggcatcaattatgagctgtttttttttttttttttttttttttttttgagacggagtctctatgagctgttttttaaacaattcattattacatcagctggtatgattactgttctctccattttggggggtgactctgccaacaggggatgggttccattctattccaatttgtgttgttatatatgtccacatagcaatacagaaagtgggtccactagctaatacagtattaccatatttgttatgaaaatcaggtgtatgtttctggtggctctgccttgccattgtttgctgaatgcttcgaacttggagatgactgagtttgtttttgaccaagggaaacatcgtgaaggtgaagatagaactgcagcaatgaagctgctgctttaatttttgcatttgtaggagagacagagtttcactgtattggccaggctggtctggaactcctgacctcaaatgatccacccgcctcagcctcccgaatctcccctttttttcacacaaggattagcagagtcagttgtctgtcagggctttttgcccccagtagtgtacaactctgctctgtaagtgattttctttaaggaaactactgtgtaggttagcatttatgacaaaatggggaattggtcctttctgttgatctgtggttctttaacttgaatgagcaggtaaatcagctccttcttcctaaaaaatatgcatatttttgggtcatgtcccctacctaccctgccagttcagtctctggggcagtgactgaagtctgcatttataacaggagatgctatggaaatgatcttgtttctagagtctctggctgaagcagctcttattttttgttttcttcatgctgtaactgattctacatttgaaatgtggggaggctgatactgtgtgaacagctttgtagaaagagaaaaggaagatttaggcccacacgtgcaggtgctagcttggctgttttcttctattgggggaagagggattgtgcttcccccccaacccccaccccgcccctttttttttgcctagatagcctttaacgatgtcaatgtctggccaggcgcagtggcttatgcctgtaatcccagcactttgaggggccggggcagcggattacctgaggtcaggagttcaagaccagcctggccagcatggtgaaacctagtatctactaaaaatagaaaaattaacctggcgtggtagcatgtgcctgtagtcccagctactcgggaggctgagacagaagaatcgcttgaactcaggaggcagaagttgcagtgagctgagattgcaccatactgcactctagcctgggtgacagagcgagactccgtctccaaaaaaaaaaaaaagatgtcaatgtgctgtgcttcccttttagggtgacttggtggtattgatcccttggtctgtgacaggccctgtgctaggttgtttccatatcttatcgtatttagtctttacacaaacatggaaaggttattgccattaaccccattcttattttgcagatgaggaactaagctcacagggggaaactgcttgaggttataaagcgcttggatggtagagctgagatctgcatggaggtctgtggttctacagagtccctaaactgtcgttcccacagtaccaggctgcctctttggagcagggttttcctaagagggcaggtgttgtcaattaggtccaggtgttcactgatagaatgcgagagtggatgtagtggtctgcactttctggagccggtgttgtcttgagaaccatggttgggagacagggtctggtcccagctcctgctcagtgattatgggcggttcactgcctttgctctggactcttttgagcagttagaagtcaaagagggagtgggaatagatgagtgttgtattggccacagaacctaaacccaaaatgtaaaattgctaagaagaaaatacttagagggaggggaaggcatgcccacaaacatatgcacatccccacccctcaatctgtggaagcctaaggacttcaagaaaacttttttttttttttgagacggagtctccctctgttgcccatgctggagtgcagtggctcgatctcagctcactgcaacctccgcctcctgggttcaagtgattctcctgtgtcagcctcccgagtagctgggattacaggtgtgtgccaccacgcctggctaatatttgcatttttagtagagacggggtttcaccgtgttggttaggctggtcttgaactcctgacctcatgatccacccgcgtcggtctcccaaagtattggaattacaggcgtgagccaccgtgcccgacctgactaatctttttttcctttttttttttttctaaaaagggccagtccaggcgtggtggctgacgcctgtaatcccagcacttttggaggtcgaggcaggtggatcacctgaggtcaggagttcaagaccagcctgtccaacatggtgaaacccgtctctactaaaaatacaaaaagtagctgggcttggtggcgcgcacctgtaatctcagctactcgggaggctgaggcaggagaatcacttgaatccaggaggcggaggttgcagtgagccaaggtcgagccactgcactccagcctgggcaacagagcaagactcgtctcaaaaaaaaaaaaaaaagaaagaaaaaaaaagaaaagactagttgaaagcagttgtgagaagaaaggaaagagtagaacaacaagttcgatctgtaactaactgtgaaccatcaattgagataactcactactttcagaccagcctgagaaaacatgtttgaaaaccctccgttttccatctgtggcattctggaataatctgacttccgaagagtgaatgagatagaaaagaagccctggacgctgggcaggatggcacacatctgtaattccagtgcttttggaagttgaggaggcaggattgtttgaggctgggagtttgagaccagcctgggtaacatagaccccaatgccccgctatctctacaaaaaactaaaaaataaaaaattggctggacatgttggtgcatgcctgtagtcccagccacttgtgaggcagagacagtaggattgcttgagcccaggagtttgaggctgcagtgagctaggttcgtaccactacactccaggatgggtgacgaagaccctatttctttctttttttttttttttgagatggagtcttgctctgttgcccaggctggagtgcagtggcgcgatgtcagatcactacaacctctgcctcccaggttcgagtgattcttctgcctcagcctcccgagtagctgggattacaggcactcaccatcatgcccagctaatttttgtatttttgtagagatggggtttcaccacattggccagactggtcttgaactcctgacctcaagtgatccgcccgcctccacctcccaaagtgctgggattacaggcgtgagccaccatgcccggccgatgaagaccctgtttctaagaaaaaaagaggccctggaatattggctgtggtagatttcatgagcaacagaaatctgtccaatccaaaatcacccatgtattatccctatgtctttggtcctagagaacatgagcttgttatgcatctcagttttgttcttagaacccttttagtgttactgactgctataagattgtctgcaatgctgagtccttaaccctcagaggggcaagaccaggaatctttgtttcatcttaaagtctaaggacaaaaactccttgagggagtctgaggcaggtagcccttctgtcacgttagaggagatggaacaggatacacttattttgagttccttcatttacatgttgtttgttaggtagtgtttgtggccacaggagaactctattattagctacctacgggaggattccatgtgaagacaatcttttagtaatatacatgaaaccatctgagtaaaatgtgggcctctctgttgtccattattctgtctgatttattgaagcccaagttaggctgtgtttagcatgaaagtttcaagatgatcctttgtagtcctttggaagttaaaaggatcaaagaccgagatatatctaaggacggtcatcccttagcacctttggccatagtttgggtcatttcagcactctgaaatgggtctgtggtttggaattagactgaggagcttgagcaataggcagtgcggggtggtgggaaaaaattggttggaggtcagtagacaggcttggattccaaagatagctgtctcagacttaatcatggaactcaggttccttttatgtaagtcctccttctggaatctgccatcaggagtaagcttcaaaattaactccaagtagctgaaaatgttggactgttaggtaacattactcaatattgacttttggatgttggaaatgcctgtaaaaatggcagttttcattttgatgtaactgatcctgaactaactttgttgataaaatagttgaaagtagagtcttgggtggtttgttggcacacataatatttaagatttcaagataactggagtcttaaaactcccatccccccatctccgtccccagacttgccagagttgcaccatggttgcttgagagggttctgtttagaattccatagcattgtttatcataactgctttgcttgccaacaccctgacaatataggcaggtaaaaacaggaacccagacctttgttgtaagtactcataagtcattgctgagctgcctgtgtagataattgtttatgctcttatccttttatgttcttatccttttatcatagcctgttcatctaattgttgttgtcatctaattgctgatgttttaacccaaccaggcataactatgtatctttatatcttgtttgctagccagtttcttttttttatatttttaatttttttaaaaatttttaatttttgtgggtacataagtgggtgtatgtatttatgagttacatgagatatcttgatacaggtatgcaatgtgtaataatcacatcagggtaaatgggggtatatatcacgccaagcatttatcctttgttacaaacaatccaattatgtagttattttatttttattttttattttttttaggcagagtttcattctgtcacccagtctggagtgcagtggtgtgatcttggctcactgcaacctccacttcctgggttcaggcgattctcttgcctcagcctcctgagtagctgggattgcaggtgcccaccaccatacctggctaatgttttttgcattttttcagtagagacagggtttcaccatgttggccagacaggtcttgaactcctgacctcaagtgattcacccgcctcggtctcccaaagtgctgggattacaggcgtgagccatcacacctggccaagttattttaaaatgtacaattatttttgactatagtcaccctgttgtgctagcaaatactagatcttactcattctttctaacttttttgtaccccttaaccatcgacacgttcccccacccctgcctactacccttcctagcctctggtaaccctccctctactctctatctccgtaagttcaattgttttaatttttagctcctacaaataggtgagaacatcaaagtttgtctatgtcttgctagctagtttcgtcatgtattggtgacacctgtgacaaataatcacctttattttgtaattaccaggaataaaggtcagtaggtaattactaattgtctatggcagtggttcttggactttggtgtacatcagaatcacctggaggagttgttaaaaatgcacattcctgtgccctgttcccagttgctgtttcagtgtatctgaggtgggactggtaacttgcatttctaatgagttcccaggagttgctcatgctgctgctgtgggaccacactttgagaagcactggtttactctgaggcaggtactgtgtgtggaagaaagtggtataagttatggtctctggccttgaagagcctgcttttgagttgtgatctgtacttatatgaaggtagacctaagtttgaagctctgtaggctggtgccaaatgagcctaagaagttcagatcgggggtaatcattagtagctgaaaagcccggaagcttttacagaactgttgtgggtatttgagccaggcacttaaagatcagtgagtggcacattcccagaaggaaaacacttttaatacagatgtggagttagaagtgtcgctggcagtttcagtgggtagcttgtcactttgagttggtgggtattggatggtggtaatgggaaataaggtttggaaaattattggggtcagattgtgttggaggttgaatacttttggacttcatttggtacccgtgattagccattgactaggccctgttgaggactggcggtggaggggtgtgggaagagaatgtatcagaaggagaaaaccaggtcttaactttgttgttgcattcttcggctcccaggcctcagggttttttgcagggggtgggggaattggttctaaaaagagaaaaacctgtttactagtggaaaccattacgtgattaccaatggtttactgaatcttgacaagattaattgtgattattttaaatccctggggcaaaaatgggtggggcatgaattggctctaagatgcaaaatttgaaagtgttgtttgggtacaactaatgagaacttctgtagttggacaccttatttgggaagataagattatctgggtttccagcttaaggtttttagcagggacggatctttattgaataatttttttctaatgggaaaaaactaacagtgtagcagaaaaaaactaacaatgtagcagcaaacattttgtgttttgaccaagtctctattttagaacattgtatcatgaacataattcaaatggattttgagttgtggaaatagaacacatctcttgaaacacaatacctttagctgaatgatgttccttttttttttttttttttttttttgttttttttttggagaaggagtcttgctctgttgcctagcctggagtggagtgcgatggcaggatcttggctcactgcaacctccgcctcctcagttcaagtgattctcctgcctcagcctcccgagtagctgggattacaggtgcctgccaccaagcgcggctaattttttgtatttttagtagagacaggtttcactatgttggccaggctggtctcgaactcctgaccttgtcatccgcctgcctcggcctcccaaagtgctgggattacaggcgtgagccatgatgttccttttaaaacttgagagctattactgcccccgatcccggaacgtaaagattaaattataaaagtgaaaaattcaccaaggaataaataagtctgcattttactcactttcttaattgttttactgctctttgttcttcacttaaattcagtgaaattttttttattttaatgaagcatctaaaaacaagtttatttttttgatggatttcaatttacgtaggtagaaaactaatcttaactaagaaatgaagataagcatactgttatcttggacataagtaagactgaatatgattcttaaacagttttaaactcctataagcttattatgtggttggagatcccttgtgtttatactttgaaaagttaccacttttcatgaaattgtgagttaaaatcatgatatcttcttgaattttaggtacttacactgtgaaattttatgatggagtagttcagactgtcaaacatattcatgtcaaagctttttccaaagatcaggtgagaaatgtggttttgtgctttgtgttatgaataatgctaacattgtagttttgtttcctcaaataaagacattacatttgtttatgatagcaagtgtttatttcctccatctgacacaatttcaccagaaaataatacacaagttttcagaagttgtaaatatttgtctctttgctgtttcctatttatttatttgtttatttagaaacagagtcccgctctgtcgcccaggctggagtacaatggtgcgatcttggctcactgcaacctctacctcctgggttcaagcaattctcctgtctcagcctcctgagttgctgggattataggcgcacgccaccatgcctggctaatttttttgtatttttagtagagacggggtttcaccgtattggtcaggctggtctcgaactcctgacctcaggtgatccacctgccttggcctcccaaggtgctgggattacaggtgtgagccactgtgtctggccactgtttccttttaacagagattttttttcaaaagtgccaaatgcttggataccattgcctatattctgttctcctaatcttttttcaacaatggttattcttttcttctctctgtgccctgcgccccacaagagctgttagccatacaggaaacttgttgaattgcttgaggagacctccagtatgttttctgtccatctagctctgtcttttagcttaggaccattacttggtggtttacagagctatcatttggcacagatttggcagccacttgtgctagatgtgcctggtttgtgattttggtatcctgttgttccagtcaccatgcatgtacttgcctgagcatggggcctcagttttggtactggaaatatggtttgcatagatacgggccatctagaagtgttgcctactttcttcatgatttttccccttttgtctttttcgtgtttatgttttaatagttgaggggaaaatagagatcaaaatttggatattagtctttttaaaaatcctgattattactaatttcagctgttgagacagctaatttagcaatttagtaaaagattttatcactgaggcatcataacttgctactcatctgcttggatagtagttgatgtgacaatatttggtgatgctataacctgttgtgtctttggtttttggtttttttttttttggagacagagtcttgttctgttgcctgggctggtgtgcagtggcgcaatcttggcccactgcaacttccccgcctccccagttcaagtgattctcctgcctcagcctcccaagtagctgagactaggcgcgtgccaccacgcccggctcattttttgtattttggtagagacagggtttcaccacgttgtccaggctggtctcaaactcctgagttcaggcaatctgcccacctcggcctcccaaaatgctaggattacaggcatgagccattgcgcctggccctctgttgtgtctttgtgatgatgaaatgattctacttatcagagatttttaatgaattcttctgtatgtatatttgtaagttgtgttttttttgagaccgagtctctgtctgtcacccagactgaagtgcagtggcccaatctctgctcagtgcaaactccgcctcccaagttaaagtgattctcgtctcagccttctgatttgctgggattacaggcatgtgccactacgcctggctaatttttgtatttttagtagacggggtttcaccatgttggccagggtggtcctgaactcctgacctcaagtgatccgcccaccttggactcctaaagtgctgggattacaggtgtgggccaccatgtctggcctattcataagtttctaagaaatttttttttttttttttttttgagatggagtctcactctgtagcctaggctggagtacagtgatgcaatctaggctcactgtaaactccacctcccgggttcaagcaattctccttcctcagcctcctgagtagccgggactacaggcatgcaccactatgcccagctaatttttgtatttttaatagagatgggggtttcaccatgttggccaggctggtcttgaagtcctgacctcgggtgatctgcctaccttggcctcccaaagtgctgagattacagggcatgagccaccatgcccagccgattcaaaggattttgatacatgatacctttagtggtaacctcaagaatgtttttgccttttgctggttttccttttcagaaaattaacaaaattattacataaagctttggccctgatgatgctttttctttgttcacttgtctctctggcatgtaaggagccatacagtactctaaaacattattttggccttaaatttggcaatttttgtgttaggtttgtagaacgagttaatatagaggacagaattataaacttgtccagaattggcaggttatatccagaaccttcccaagtggaagtccagggctctagataacaattgttcatctgtttactctgcgatactcagtaaattgatggatagcactcacagtgctttggcttggaggtgggtgccttacccagtgaggatttctgggtgccatgcttcatttctcatttcccaatggcctctgagtgtctgaccttagcccggtaggcccttaagcacaggcccaaggctcctggacttggcttcttttccaagagggtacagtggtttggctagagttatctgtcatgggcaatttcaaaggtttttcgtatactattggaatagattgagttttttttttttttctgtaggactgcactgccttataaatgttttgatagtctctatattagtaacacttatgtttttgaagttataatacgtttactgtagaaaaatatataagtacaaagcacaaagaaaataaaaactataattccatcaaacagatatcattgttcttaacgttttggtgtgtaacttgacttaacaatttgatgtatacatctttctgtgttttttattaaacgtacgtgtgtgtatttatttattttcaaaattggagttgtggtacattaatatagtactgctcttttaactaacatttccccatgttccttaatattctgagaatataatttttaacagctatgtagtattctgtaatatgtatgtaactactttgtgtaaccaattcccaaatggtcattaaggatatttgtaaatccaggtacacaagtctgattattattttagctaattttatttctaggaatttattctagttcaaaggtataacctttttagttttgactcaaattgccatctcctccctgaactcccaacaagaagggcaatttcagtttatatttctgctggctgttaccgagaatgcctgttctcaaacctggctgctttcagaatagtttgggggacttgaaaaaatatttccttgtttattatttttccctgtagaacaaattaaacttttatttgttgagtatttaggtactccttcctgcttccagtgaaaacctatgtgcctagtgtgtgctaggtgctgggcatcccatatgaacatagtatggtggtctctgctcttttgaggtcctagaagagagatatgtacacaaataaacttaattatagttttggaatctctagagctttcagacctggccttattatgaaacagtcacaatagaggaccctcgatttttagtgtgaattttaaagaatgtaatttagggagaacataactaagaagcggtatttcctaccaatagacaaaaactccaagtagctcaggaacatagtaggtggcttgttgaactgagcacagcctttacctgatagagaaagcagagaccctggttctgggttggataatctttatagttttcctgttaagcttccagttatcagtttttgtttttctatagacaagacatcagcatttgctggcaaactgaaccaggcctctgaaaagctctgggtcagtatagtcatgctggggataaggacagagcatgaaggcattttcttcgaacacctttgtcagaaagattgctttccagaattttaaggccaggcatggtgactcatgcctacaatcccaatactttaggaggctgaggcaggaggattgcttgagcccaggagtttgagaccagcctgggcaacatagggagaccctattgctacaaaaaataacaataaaaaacttagctgggtgtggtgaaacatgcctgtggtcccagctactcagaaggctgagatgggaggatcgcttgggcctgggaggtcgaggctgcatgagccatgattgtgccactgcattccagcctgggcaacagagagagactctgtctcagaaacaaaaacaaacaaaaacccagaattttattttctagtgacttattcgtcataataagggagattgcactgtctccggaataattgaattgttttaagtttaaggattggttctcaactcagtacaggtggctgttgtcagtggtgctttgtatatgtgatctggcgtatgtcttgttttaatttctttgtttgtcttcataagtttgtaagaaactcctaattttgtatttgcaagtaatcacgaagtgtttcatcgctattttgctcattttagaatattgtgggtaatgctaggcctaaagaaacagatcacaaaagtctttcatcatctcctgataaacgagagaagtttaaagaacagagaaaagcaacagtgaatgtgaagaaagacaaagaagataaacccttaaagacagaaaagcgacccaagcagcctgataaagaaggaaagttaatctgttctgaaaaggggaaagtgtcagagaaaagtcttcccaagaacgagaaggaagacaaggaaaacatttccgaaaatgacagagagtattctggagatgcccaagtggataagaaacctgaaaatgacattgtgaagagtccacaagaaaacttgagggaacccaaaagaaaacgaggcagacccccttccatagctcctactggtgagttttttaagtgggctctgcaatgggcaatgccagagtattcttctgtggccctttgtggttctttgtaacttgtgtacgtcaatcgtttatttttgtgactgattttgaattgtcttatgatctggaaacaagttgtgttcatgaagctgaatttaagtgaggtacatatccaagtgaatctaagttgggaagcatgttcataactgagtttgctaaagtagtggttaactgttgactagatacttcagcttatatgataaaacctgataaaccgaggccttttgcttatgctttttcaaatgatctcagtttaagtcagcttaatagaatctagaatcaggaaatagagttttaatgagacagacatgaaagaaaagtaatagtaaaaaggtatgggcttctgaaggagatggggacaaaggaacattgaaactagaaaagcatgggtgcattttgaaattgagctccttggagagtgattattgattagaaattttcacagtctaaataaaaagccgagatggctaattggtaagagtcaaggttagagggtatagatttagggaagaatgcagttattaaaaaacttaaaatttggaattcttctagaataaccaagaatgaaacaagccctgatttcttcctaagccaaacactcgttctccaaatcaattcaatggcatgaagaggcccccccggttctctggactgagcctgccattgattaatatgtgcagtgaccttcagacattcttgattgtgcattctttatgtgttcagttgaaaaactgtgaatcccctagcacgttttaaagcagtatttatctttttctcacaagtttaaatagctgcagtggatacatttaaaatacaaaacatgaaggctgagtgcgttggtgcatgtttgttgtcccagctactcaggaggctgaggtgggaggattgcttgagcccaagaattccaaaccagcctggacaatgtagtgacaccccatctcaaaacacacacacacacacacacacacacacacacacacacacacacaaatattttcatcaaaactgtggaactacagagcaaaccttttcattattccctaacgatgtagagaatgcaaagccagtcttccttatcaaatcagactatcagacttaatttctgtggaaaaaaatttaacttacttcacataagtgtattagtactcattgtaagataggaaattatataataggttgatttgtctctatatgaaataagggatctttccctgtagtgcttgtaactgggttttgccctcaagagctgagggtgctgcaattgtctgtaggcctaaatagggcctagacctctgctgtctagtatggtagccactagctgcatggggctattgactacttgaaatgtagctagtctgaattgagatatgctgtaagtgtaagtaaatgctagatttcaaatacttagttcaaaaaaagaatgtaacacacctcgattttaaaatactgattacggctgggcctgtaatctcagtggtttgggaggtccaggcgggtggattacttgaggttaggagtttgagaccagcctggccaacatggtgaaaccccgtctctactgaaaaaatataaagacaaattagccaggcttggtggtgggtgcctgtaatcccagctactcaggaggctgaggcaagagaattgcttgaaacccaggaggcggaggttgcagtgagctgagatcgggccactgcattccagcttgggcgacaaaacaaaaaaaaattgattccatgttgaaatgtttttagaggctgggtgcagtgcctcatccctgtaatcatgccagcactttgggaggctgatgagggaggatcacttgagtccagaagttcgagaccagccttggcaacatagtgagacctcatctctacaaaaaatgaaaaaattggctgagagtggtggcacgtgcttgtagtcccagcgattccagagtctgaggcaggaaggttgctgagcccagtttaaaaaaaaaattttttttaaagtactggattaaataaaatagtatttaaattaactttttaagttgtgtttttttttttttttttttttttttgacagggtctcactctgttacctaggctggagtgcagtggcgtgattgtggctcactccattctccacctcctaggctcaagcgatgctcctatctcagcctcctgagtagctgggactacaggcacatgccaccatgcccagctaatttatttcttgtagagacagggtttcactatgttgcccaggtttgtctcaatctctgggcctcaagcaagcaatcctgccttggcctctgaaagtgctgagattacaggcatgagccaccatgcctggcacttaaaaaccaaaccctcttatgtgatgagtaaaaaattcaaaattggccaggcgtggtggctcaggaatttgagaccaggctggccaacatggtgaaatcccgtctccactaaaaatacaaaaattggccgggcatggtggttcatgcctgtaatcccagcattctgggagaccaacatgggtgggtcacctgaggtcaggagttcgagaccagcctggccaacatggtgaaacccccatctctactaacaacacaaaaattagatgagcgtggtggcatgcacctgtaatcccacctacttgggaggctgaggcaggagaatctcttgaacccaggaggcagaggttacagtgagccgatatcgcaccactgctctccagcttgggtgacagagcgagactccatctcaaaaaaacaaaaaataataaaataaaataaaattacatgtggcttgcactcttagtatatttctgttggacagcactgactttatgttcactggctttctcaactgagttttgggagagaagccacaatacccaaggcatccttgatctgtgatggattgaccttagtgcattgagaatggtactagctgtataccacccttaggaaaacagagaaaatatatctctgttcagatggggaaccccagttgagaaaatctggaagttttaaacctccaggctgagcaccatgttaagatgtgggatgagtgagaggcaggcccttttatgtaaagtgggagaagggcagttaaaggcagttattatacaaggagaggtggaaaatgtaaactggcagaaatctgacatgtccttaggcagaaatctgacatgtccttagctcagtttaggaaagagtatgtatgagaattgagtgttttgaaactaattctcctttaggtattcatgccctggcttataccctccagaaggtatgtacagaagtagttgtaccccaacaagcagactgctcctttgaagccacatgactccattgagataagaacaaggacattcagtttttatatttttataagtgtaggatttcataatgagtaggataaatttaatatagaagggatgttttctaagtttatggttaatccttgcccaaggcatttgtgaaaacagattccagccatgcctcagttcttttccagtcagactgtctggatgggaatctgggaatatgaattgttaacaagcttcccagatgacttatactgtaagaagagtttgggaaacactcaagttctgtacagtcagctcctatttatatacggtatcaaagggaagaagacttgccaagtatcccatatattgttcacatccccttaaaacattacttggaataagttcattgatttgtagagccttccttgagcaccctagattgtatagacttgattgggaacaggatctgagctatttagagagggttgtttatatatattttaatttttatttttttgagatggagtcttactctgtctcccaggctggagtgcagtggcatgatctcggctcattgtaaccaccgcctcctgggttcaagtgattcttgtgcctcagcctcccaagtagctgggactacaggcatgtgccaccatgcctggctaattttttgtatgtttagtagagacagggtttcaccatgttggctatgctagtcttgaactcctgagctcaagtgatctgcctgtctctgcctcccaaagtgctgggattacaggcgtgagccaccacacccagcctgtttgtatttatgtttaacttggaatgtgtgggatttccaagttctgccagttggaacaaaataatattggcccattgggaagttggaacacaggaagagcctcagagttcaacagtcttctctggtttgcttcctcacacttcaggccgtgtcttgttgagccatttgaccgacctgaagctacaggtcttagatgagtcttttctgtccctcttcccctcttctcatctttctcccttcccttcctcttttcctcccatttacttctcttcttccctcttcctttcctccttcctcttctctctcctcctttcacccttcctgagaccccttagctctgccttcctgcccaacttcccagtttctttcttctgcctgccttttcaattctcatcttttctgatttggggtaagcttcttaggtggtaggtttaaaacaaaatagtaagggctgggcatggtggctcacgcctgtaatctcagcactttgggaggtcaaggcaggcagatcacctgaggtcaggagttcgagaacagcctgaccaacatggagaaaccctgtctctactaaagatacaaaattagccaggtgtggtggcgcatgcctgtaatcccagctacttgggaggctgaggcaggagaatcacttgaacccgggaggcagagcttgcggtgagctgagatcgcaccattgcagtccagcctgggcaacgagagcaaaactctatctcaaaaaaaagttaatagtaaatactatgctgggcaggtggctcacacctgtaatctcagcactttgggaggctgaggcgggcagatcacttgatgtcaggagttcaagaccagcctggccaacatggtgaaaccccatctctattaaaaatacaaaaaaaaaaaaattttgctaggtatggcaggtgcctgtaatcccagctacagggaaggctgaggcaggacaatcacttgaacccaggaggcagaggtagcagtgagccgagatcgtgccactgcactctagcctgggcaacagacccagacttcatctcaaaaaaacaagcaagcaagcaagcaagcaagcaaacaaaatctaaatagtaagtactcttcaaaggcttagcgtctgtactgctaaattatgtcagagctgggtttgctggggaccagcagccttgcctgaaacattgactgttaactagcatagtctcccaagaatttttttaggattttgtttaagaaaatacaaattctcggctgggtctcatggctcatgcttgtaatcccagaactttgggaggacgaggcagctggatcacttgaggtcaggaatttgagaccagcctgaccaacatggggaaaccgtgactctactaaaattacaaaaattagccgggtgtggtgtcgggtgcctgtaatcccacctactccggaggctgaggcaggagaatcgtttgcacctgggaggcggaggttgcagtgagcagagatcgcggcactgcactccagcttgggtgacagagcgagactccatctcaaaaaaaaaaaatccacaaattctcttggacatttttcttgtaccctcaaaactaggcccagtgctaagataattaatgtagcaagtagaggttgaaaactggagctggatcatagaaaagattcaggaggtcaattggcaaggtatcaccatctcctgtaaggaagtaatttctcactcattttactttttttcttttatcttaagtaagaatgcccttttgatggcccatttataatgcagtgatttctgcatatatatatgtatatatgttttatttatatataaaaatgacagacactaagaaattatgtatctttttttgtgtggttttataaacatggtagctgtggattcaaactctcaaactttgcaaccaataacattggaactgagaagaaggaaaatatcaaaaggatgtgaagtcccattaaaacgtcctcggcttgacaaaaattcatgtgagtctacagtttgtttatgtgtggctagaatttgacgttgtttgggtcaacttcctctatattcatcctgtcccccattccctataggctctaatgtttgtctctggtcacatgaggtaatgtgagttggatgcagttggatcagaaggagtttttgctagaagaaaaataaatcccaaagcacaaactgtactaatgttgggttctgtggtatcatctccatatccataaatcacatttgatttggatgccactggaaatttaatggcttaggaagggatgggtttcatatgcagagtgaaactttaaaaatactacttattggcctggcgcagtggctcatgcctgtaatcccagcagtttgggaggctgaggtgggtggatcatctgaggtcaggagtttgagaacagcctggccaacatggtgaaaccctatctttactaaaaatataaaaattagccgggtgtggccaggcgcggtagctcacgcctgtaatcccagcactttgggaggctgaggtgggcagatcatgaggacgggagattgagaccatcttggctaacatggtgaaaccccatctctactaaaaatataaaaaattagccgggtgttgtggcaggcacctgtagtcccagctattcaggaggctgaggcagaagaatggcatgaacccgggaggcggagctagcagtgagccgagatcgcgccactgcactccagcctgggcgagagagcgagactccgtctcaaaaaaaaaaaaaaaaaaaaaaaaaaaattagccgggtgtggtggcgggtgcctgtaatcccagctacttgggaggctgaggcaggagaattgtttgaacttgggaggcagaggttgcagtgagccaagactgtgccactgccctccagcctgggtgatagagtgagactctgtcctataaaaaataaaaatacaaaataaaatactatttattgatttaaaaaaataccctctggagtgagttggctcaaatgtttaaataaatttaaaataaaatagtatcctgttggctccaaaaaggatttgtgatagctctaagtaaggctcttataaacctttttaagtcgactttgcaagttagtacatttgggaagccccaaaatagaacatagttgtcaagattcggacatgacctagcacatgttttcagaccatgaatccttaaagaagtgaaattctatcctggcagggacacttttcccttacttaaaactgtaaactagtaaagggtatttccttttatcactactctaacattccagtagtctctctgtaaagtccttttagagacatccagccctgaaatctgtagtagcacagttatttcttcttgttggtctcttgactacaactctcttaatggtttaatagcccaggaaaagtcaaaaaactactcggaaaacactgacaaagacttatcgaggagacgttcctccaggctgtccactaatgggacccatgagatcctagatcctgacttggttgtatcagatttggttgatacggatcctttgcaagacacgttgtctagtaccaaggaatctgaagaaggtgagtcagtctgttcaggaattgtcttgccaacctggttcctatttagtgagaatcaatgtaaatcattatgttctgccttccacaagtattaaattgtcttgaaatcaaactattgaatgtgctgcagtgtttttataatgtattgctcttcactgatgatttattcaatagacatactttctggatgcatttgtggttggttttgcttatctaccgttcagtgttggcctggaggtacactgttcgaagagccctgcttctctctctctgctgccatctcattcgtgcctttgtgtttatacttccagctatttttcctttcactttaacctctttctttgagaagctcacaagccagcctgtatgtatgggaacctgtgaatgtatgcttttatgttttagattaattccttcctctaaaaagtccctggctttcttagactgttgtaggacttttgatttcagaattacatacatgtatatttcccccaaactttctttttttcttctaggtcagttgaagtctgctttggaagctggccaggtctcatctgcactgacttgccactcctttggggatggatccggggctgcaggcttggagttgaactgcccatcaatgggagaaaacacgatgaaaacagaaccgacttctccccttgtggaattacaagagatttcgactgtggaaggttcatatttagagttaaattaatcctctttttatatacacttttgcttatgctttgtgaactaaaaaaaaaaaaatgacttttctgttgttgtttttcaccttttattaatattcccttatcattttaatgttatgctcctttcatttctgattttgataatttgtgttccctctcttagtatgactagggctttatctattttgttttcaaagaactaactttttacttcaattttctctattgtttatttttaaaaatataattgatttctgttttgatcttgctttcttccttcaattttttctagaactttacctaattgattttagatctttcttccttttttttttcattacctggtgaaaagatctttcttcctaatatgagtatttaaagttataaatttctggctgggcgcgatggctcatgcctgtaatcccagcactttgggaggccgaggtgggtggattgcctgaggtggagagttcgagaccagcctggccagcatggtgaaaccccgactctactaaaaatacaaaaattagctgggcatggtggcaggcacctgtagtcccagctactcgggaagctgaggcaggagaattgcttgaacccaggaggcggaggttgcggtgagccaagatcatgccattgcactccagcctgggcagcagagcgagactcagtctaaataaataaataaataatgaaattatacatttcccactgagaactgctttagcagcatcctacacattttgatacgttgtgtttttatttttgttcaatttaatatatcttgtgatttatttgttgaccatgggttacttagaagtatgttgtttcagtttgaagtattttatgtttttgtagataccttattgctattgatttctaatatagttttactgtggtcagagaacatactctgtaggatttcaatctttttatatttgttgcgatttaatttatggtccagcatatgatctgtcctggtgaatgtttcatatgcacttgaaaagaatgtgtattttaccgttgtcatgtgtttgttctgtatctgtcagttagatcaaggtagttgatggtgtttctctgataaattgatttttgtggggtttttttccttttggtctagttctgtcaatttctaagagaaggttgttaggttgttaaaatctctgttattgtggatttgttcatttctccctttaattttgtcatttttgctttgtgtattttgaagatcttttagatgcatacacatttataattttttttttttttgagacagaatcttgctttgtcacacaggctggagtgcagtggttgatctccactcacttcaacctctgcctcctgggttcaagcaactctcatgtctcagcctcccgagtagctgggattacaggagtgtgccaccacgcccagctaatttttgtatttttagtagagacagggtctctccgtgttgaccaggttggcctcgaactcctgaccacaggtgatctgcccacctcggcctcccaaagtgctaggattacaggtgtgagccactatttctggcctaaatgtaattgttgatatggttggtttttaggctaacatttggctgtgttttgtctgtttttttgttttttttttttttttttttaagacagagtcttgctctatcgcccaggctggagtgcagtggtgcgatttctgctcactgcaacgtctgcctcccgggttgaagcgattcatctgcttcagcctcctgagtagctgggattataggcacccaccaccacaatcggctaatttttgtattttttagtagagacggggtttcaccatgttggccaggctggttgtctgtttatattatttgtgttttgttgttttgtttcttgttttttaggttaactgattttttaagaatttcattttaattcatctgttagcttttagctgtatttctagcattttgaaagaggttactctatggattatggtatacatccttaacttctcacagttcacttagagttaatatttaaccactttatgtaaaaatgttccattaacctcccccatgttgtagttgtcacatgaattatatctgtatatgctataaattcctttttaaaaaattttttatttacatatttttttgagatggcatttcactcttgttgcccaggtggagtgcaatggcacgatcttggctcactgcaacctccacttcccagattcaagtgattctcctgcctcagcctcccaagtagctgggattacaggcatgtgccaccacgcctggctaaattttttttgtatttttagtagagatggggtttcaccatgttggtcaagctggtctggaactcctgacgtcaagtgatctacccgccttgacttcccaaagtactgtgattataggcgtgagccaccacacctggcctgctataaatttcataatgtagtattataagttttgctttacacaattatgtatgttaaagacgataaggcaaaaagcgacagtcatatttacacatgcctatttccaatgttctttatttcttcgaagatttcttttcagcatgaagaatttccttcagattttcttataggttcctgatgacaaattcttctggtttttgttaaaacttgactttttttttttaaagatagagtctcactctgtttcccaggctggagtgcagtggcacaatcacagctcagagcagcctggacctcctgggctcaagtgatcctcctgtctcagtcacttgagtagctgggactacaggcgtgtgccaccatgtccagctaattttttttcttttctcaacttttagttaaaaaacaaacaaataagactgtgtgtctatagaattgtctactttttatttggataacttaaaaaatttttttttgaatagtttttttttttcttggccagatgctatatagttaacataaatgtagtagagcagctgtttgaaaatagtgaatctcagcactctgggaggttgagactggagggtcacttgaggccaggagttcaagactcgctatattgaaggccttgcatcaacatagtgagaccctccctcttcaaaaaataaaaaaattagcctggcatgatggttcatgcctatagtcccagctacttgggaggcggaggtgggaggatcacttgaaccagggaggtcgaggctgccttgagctgtgattgtaccactgccagcctgggtgacagaggaagaccctatctcctaaaatattttaaaaaattggccaggggtggtggctcacgcctgtaatcccagcactctcggatgcctaggcgggcagatcatttgaggtcaggaattcgagaccagcctggccaacatggtgaaaccccgtctctactaaaaatacaaaaatttgctgggcttggtggcgcacgcctgtagtcccagctactctggagattgagacaggagaattgcttaaacccagaaggcagaggttgcagtgagttgagatcgcaccactgcactccagcctgggtgacagagtgagattccatctcaaaaaagaaaaaaaaaaaattaaaagagtaccgaagtattcattcctagctcatctcggcggctgttctcttagttctctgtctagcttcgtccatagtgttgtgcttcagcctcgagggcttgtcggggcaagggatcttcctttttttgctactcctcctcttagtgtcagggctcttttcttcccagcctgctcttctgacatgtggggcaaattactaaagttcatatgtaaatgaggtggaaatttaatctcggaatttagttgtctgtcttggcagggagaactctagatgacagccacatcccctgtgactcagcagactaagcttttaattatgttgtcttaagggtagtggtatgttagacgtcacttgaaatttgtagttaattgttcctacaccactaggaaacacgccatgcatataagtgaggagactagattagaagctaactccagtgccttttgtaaagtttacgtattttatggggtcttgggctatactttttcccaaaatatacacatacataatttctgtcttgtgttagctaacctaattatgtttctggattgtggagaggacagaatcaagtatagtaagggtgggacaggtgagtctaggggaaaaggatgatgatgagatttcatgtcgtcgtctgcatccttacaaaggtctcacagtagcctttctaagggaataattttgaaaccattgcaactgattgaagcacttatctattttccaagagggttaatagtaagggtggaggtcaaattactttgagcttgagccaagaggaataaatatagcatggaacccattactgtatttttttttttgaatgaggtatttgctttttgctttagtgacttaaaagccagaagagatggccgggcctggtggctcatgcctgtaatcccaggactttgggaggccgaggtgggcagatcacttgaggtcaggagttcgagaccagcctggccaacatggtgaaaccccatctctaccaaaaatacaaaaattagccgggtatggtggcaggcgcctgtaatcctagctactcgggaggctgaggcaggagagttgcttgaacctgggaggtggaggttgcagtgagccgagattgcgcccctgcacccagcttaggtgacagagcgagactctatctcaaaaataaaaaaattaaaaagccagagacgaatgcagttgtgactgttgtaattgggcaagcattcatttatgcagtaaaacagaagttagtaattcccctagaagtttagaggtctcaggctgggcgtggtggctcacgcctgtaattctagcactttgggaggccaagacgggcagatcacctgacgtcaggagttagagaccagcctggccaacatggtgaaaccccatctctactaaagatacaaaaatttggccgggcgcagtgtctcatgcctgtaatcccagcactttgggaggccgaggcaggcggatcacaaggtcaggagatcaagaccatcctgtctaacacggtgaaaccccgtctctactaaaaatacaaaaaaattggccgggcgtggtggctggcgcctgtagtcccagctacttgggaggctgaggcaggagaatggcgtaaacctgggaggcggagcttgcagtgagcctagatcatgccactgcactccagcctgggcgacagagtgagactctgtctcaaaaaaaaaaaaaaaaaaaaaaaagatacaaaaatttgctgggcatggtggtgggcgcctgtaatcctggatacttgggaggctgaggcaggagaattgcttgaacctgggaggaagaggttgcagtttgccgagatcgtgccactgctctccagcctgagagactccatctcaaaaaaaaaaaaaaaaaaaaaaaagagtgagactccatctcaaaaaaaaaaaaaaagtttggaggtcatattattatctgaaaatgggctgctgcaaatatttagcaagtgcctagtaagtgccaatgccagaccctattcttttctttcttttcttttttttctttttttatttttattttttatttttgagacagtctcactgtgttgcctaggctggagtgcagtggtgtgatttcggctcactgcaacctccgcctcccaggttcaagtgattctcctgtctcagcctcccactttcttttttttttttttgaaggtggagtctcactcttttgcccacgctgtagtacagtggtatgatcttaggtcactgcagcctctaactcctggtctcaagtgatctcctgcttcagcctcagaccctattctaagctgtctcattggttgatactctacaagaagcacagaataaacaagagagaaaaacaaatagaagtacaggtccattcagttaagttctttttactaaatacctggtagaagtgggacactttgccacaggatccagatcagtgattctaacccatgaaatcttgctgtgtttgttgttagttataaaacgaatgaattgtcactgaagtatcaaaaattaacagatgatttacttataaattaactagttaagatttagcatgatgactataatagtttttgcaaattatttacttttaaattaaccagttaagatttagtgtaatgcctatagtattttagctttaatgaatttgtgttctctatggtttcttgagcaggagagtcatagatctacagccattttagtttgggaaattgtgtgtgtctatggtttttcatatcatcaagtatgtattgtgatggaaactgatagagaattcattattctgggggttagagagatgaatgcgacatctgttctaggcccttccaggtctttctgtccagacgaatggatgagacttcagatacctatgatacaagaaagtaagatgatgtcatgacaaacttagaatgaaactatgagaatagagagaagaatgacagtgaaaatgtgtgcctgctacatagaaatggacctcttcaggttggcgtgtgcgagattttcttgctctagggagattgtttaagcaatcactatgtcgacaaacacagatgtttccctttctgaattcatatgatgaagatcagggatccaaacttattcaaaaagctaaagaggcaccattcgtacttgttggaatagaaggttttgcagcaattgttgcatatggattatacaaattgaagagcaggggaaatactaaaatgtcccttcatctgatccacatgggtgtggcagcccaaggctttgttgtaggagcaatgactgttgttatatcatgtatcgagaattctgggcaaaacctaagccttagaagaagagacgctgtcttgctcttgtaggaggagcttgttttagttagacgtctcattattgaagttacgtattattgttgaaaataaactaatttgtatgggtttagatggtaacacggcattttgaatattggcttcctttcttgcaggcttgatttgcctgttgactgaattactagtgactagtttactaactaggtcattcaaggaagtcaagttaacttaaaagaaacatgtcacctaaatgcacttgatggtgttgaatgtccaccttcttaaattgttaagatgaacttagttctaaggaagataacaggccaaccctgaagtactcccagtttgctgcagaatctcacatattttggatgttatagaagagtcctatttgccctagttaatttaactttttttttgcctgttttgtggactggctggctcttttagaactctgtccaaaaagtgcatggactataacttgtaaagcttcccacaactgacaatatatatatgtgcatgtatttaaaccaaatctggaaaacttacaatacagctgcataatggtagtatttattaaagaatcacaattgtaaacatgagaataacttatggattctagtttagttctttagtaattgcaaattatatttttgctgttgttatattagaataatttttgaatgtcatcttgaaatagaaatatgtattttaagcactcatgcaaaggtaaatgaacactgtttaaatgtgtgctttgcttattttttctgtaacaatcgtaaacattaaactgaacaaattacctacagtagttttgattaatgacctaagagcaagctggtttggccagacagtgtacccaaacttttatataccatcgaatgttattacacttgtgaaattctcctgtctaacctgaatttacattccatggtggttacatggtatatgtattattattaaagtaagtgagccatgtcaaaaaaaaaacaaaaaaacaaattgacctcttcaagaccagcctgggcaacatggtgaaaccccatctctccaaaaaaaaaaaaaaaaccctccaaaacaaaacagaataaaaccccaaaaaaccaaattagccgggtgtggtggcatgtgcgtgtaatcccagctacttgtgaggctgaggtgggagaatcgattgagcccaggaggtcaaagctataataagccatgatcatggcaacactgtgctccagagctgtgacagagtgagaccctgtgaaagaaggaaagaaagagagaaagagaaaggagagagagaaagaaattaattgacttcaactcacttactgagcctttaccatatgcctaggactgctaactgttgcgtatgcaaagatgagtgggcactcttggacttagtgttcattaactgctatttggatttgctatttgcctcttggggagaggtgatacttaggttggtgctttagcggcagggatggaagaaggcggtacttgcacgggaacctgaaggatgggcagcagttaggcatttgaaaatggaggcaaagcagctagcacagcatgaccatagggcgatttctgagactgtcaggtatgtgttttgaggtaattgcagacttcctgaagtgggttaaggtggggtaagttgctgccaaactgaggttggttgctttgaggaatttactgagaaactgaaaaatgcttcattttcaggatagggagatagcctgtgttggcaggattgctttccttccatttagctattttgtggccataaggtattttttctgcatatattttaaagaagtttttattttgaaataatttgttattaaaaatgttgttaaaaaatggtacaaagaatatacctttaaccaaattccccaattgctagcaatttaccatatttactttattattctactctttaaagtactttttctagatgggatgcggtggctcatgcctgtaattccagcactttgggaggctgacgcgggcagatcacttgaggtcaggagttcgagaccagcctggccaacatagtgaaaccctttctctacaaaaataaaaaaattagtcaggcgtgatggcacatgcttgtagtcctagctactcgagaggctgaggcaggagaatctcttgagctcgggaggcggagattgcagtgagccaagattgtgccactgtactccagcctaaatgacagagcgagactctgtctcaaagaaaacaaaaattaaaaatttttttttagaaagtactttttctgaattgtttaaaaataagttccagacctttatctctaaataccttttttttttttttttttttttctgagacggagtttctcgctcttgtcacccaggctggagtgtagtggtgcgatttctgctcactgcaaccttcgcctcctgggtttaagagattctcctgcctcagcctcctgagtagcttggattacaggcacgtgctaccatgcccgactaatttttgtatttttagtagaggctgggtttcaccatgttggccaggctagtcttgaactcctgacctcaggtgatccacccaccttggcctcacaaagtgctgggattataggcgtgagccaccgcacccggcctccctaagtactttttagaaaatcccatatttaattagctgggcatggtggtgtgcgcctgtaatcccagctacttgggaggctgaggtgggcgaattgcttgaacccaggaggtggaggttgcagtgagctgagatagcaccactgcactccagcctgggcgacagagcaagactctgtctaaaaaaaaaaaaaaaaagaaaaagaaaaaaatattccatatttcctaaagacaaggacattcttctacattaccacagtataattttcaaaatcaggaccttcttcagactttatcagtttttgcctttcaccccatttatggcagtcatcttgtttttattctatatgctttttttgggcaattgaaaaaatattcataaatttgaaaagaactccagaaatatacaaggataattcaactaacattcttgtctcccatagtcccatggcccactactgttagtatttggtcatgagggcctcagggccatacactggcctgcagggcccagcttcttctggccacctgttgcctcaccttcctattgattctgctgcagccacatggcctccttgctatcctgcaggcataacttacggattctagttgagttctttagtaattgcaaactatatttttgctgctgttatattagaataatttttaaatgtcatcttgaaatagaaatatttattttaagcactcatgcaaaggtaaatgaacactttttaaatgtgttcattgcttattttttccataagaattgtaaacattaaactgaacaaattacccataatggttttgattaatgacttaagagcaagctggtttggccagacagtgtacccaaacttttatataccatagaatgttattacacttgtgaaattctcttgtctaacctgaatttacattccatggtggttacatggtatatgtattgttacactcctacctctgggccttgttcaagcacacttttattgagtactttttatccccagccagagcaagtagatccattgggaacatatcagtaatgtgatgggtaatatttatttatgtattcattcatttatttgtttgagaagggttttgctctgtcatccaggctggagtgtaatggcatgatcatagctcactgcagcctcaacctcctgggcttaagccatctttccacctcagcctgctgagtagctaggactacagacatgtggcaccaagcctggctaatttttaaattttttgtggagacagggtctagatatattgaccatgctagtcttgaactctgggcctccgccttggcctcccaaagtggtgggattggaggtgtgagtcactatgcccagccctatcttctttcacaattacatataattaggccaggcacagtggctcaagtctgtaatcccagcacttttggaggccaaggcaggcagatcacctgaggtcaggagttggagaccagcctggacaacatggcaaaaccctgtttctactaaaaatacaaaagtttagccaggtgcggtggtgtgtgcctgtagtcccagctactcaggaggctgagagaggagaattgcttgagcgtgggaggcggaggttgcagtgagccaagatcacgttattgcactccagcctgggtgacagaacgacactctgtctcaaaaaaaaaaaaaaaagaaaaaagaaaaagaatataattagctaggcattgtggcacacgcctgtagtcccagctactcgggaggctgacatgggaggatctctctaagcccaggcattcggtgttgcagtgagctatgatcctaccactgcactccagccttgacaacagagtgagaccctgtctctggaaaaacaaaaacaaaaacaattacgtataatttatttcattgtatggatgttccataatttatttacctagcccctgctgaaagatatttaagttctttctaacttttccctattaattctccctgttttacagacaaagagcctaatatttggcatgaaggagtgagttagctagagtggcacacttcctaatggtcagtattgtagaggttggtaaaattaaattaaatttttgtttgagacagggtctcactctgtcatccaggctggaatgcagtggcgctgtcacggctcactgcagtgttgacttccagagcttcagtgatcctccccactgttcagcctcctaaatcattgggaccacaggcactcgccgtcactcctggctaatttttgtattttttgtagagacagggttttgccattttgcccaggctggtctcaaactcctgagctcaaccgatccacttgcctcggcttcccaaagtgctggaattacaggtgtgagccagtgtgtctggcccagagtctgtaactgttgttttcctgctgagtgcctaattccatctgataagatgctgggtgctatataaatcaagtgaaatgaacagagtccctgcctttaggggcattgcacagtatgtgatgcaaacttctgctctcggggcactcattaaagcagtgtgtacactcagagtaagaggcttagtagggtggctagatttggagggtggtgtgtggtacaagtgatgtcagtactccaggactgggtggtgccttttgaattctttgagttgtggaaaatgtcttgatctggaaactgaatggtgtttctggtgtttctttggaaacataggtttagtggtgtgagtacaggacgatccagaaagattgctgggggaaagggaggttgttgagaactcattcaccaggaatgtattaacgtaagtaagcggaaatagggcgggaccatgaccatcttcagaagcatccagccaggtccctggaagctgggatgctgcgttagtcactgtttagtgttgctttcctgagtcggtgccatagtcttgcgtttttaaaccgagatggagtcacaatctgagaaattggtgtgaaggaggctcatgggcagcaggaggaggaggagctgggagggcaacacatctagtctagggctagctgttccaacctaactctggcatttggggcagctctgccaccttgtggaatgagtgctcagtgatttctgtgggggctgagtgcagagatctgcattccaggggctagccttgaaatgttcaccaggactatatgtcggtgtggttcctttccttccacttgagtatttgtggcttcaaagtatttttcctacgtatgtagatgcatattttttcctgaatatatttttaggaagtttttattttgaaataatttagacttatacatctatgtagcatgggttaaaagaatgacaaaaaataatttcagatttataaaaaagttgcaaaaatagcaaaaagatttcccttatacctttccctatgttggaaaatatagattccccaattgctagcaatttaccatgttagctttattattctctcccagattttattttatttcattttttgagatggattctcactctttcgcccaagctggagtgcagtgatgagatcttggctcactgcaacctccacctcctgggttcaagcaattctcctgtctctgcctcccgagtagctggaattacaggcacacgccaccacgcctggctaattttttttgtacttttagtagagatggagtttcaccatgttggtcaagctggtctcgaactcctgacctcaagtgatctacccaccttggcctcccaaagtactgggattacaggcatgagccaccatgcccagccctctcccagattttttaatgtagtttttgaattgtttgaaaataaattgcagacctttagccctgaatatttcagtgtgtatttcctgaaaacaaggacatcctctttcattcccacaatataatcaaaatcaacaccttttaaaaactttgccatttgttctaataatgttctttgtggaaaaaatgggggtaaattttttttatttctggtcaagatccaatccagatacacacgttgaattcagctgtcatatttcttttgtcttctttaatctgaaacagaccttcagtcttctactttttttactggagtgggggacaggggaataagctttttttttttttttttttttttttttttttttactttttaaaaatgagatcttcagtttttgtcttttatgaccttgacattacatttctgaatatgatatccctcaatttgggtttttctgatgtatcctcataatttgatttgggttattcactttccacagaaataccacgtaagtgatgttgtgaccttttcaggtgcattctatcaggaagcacatgaaaacctgtttgtcccatttactggtgacattaacttttatcacttacctaaggtagtatctaccagctttttctactataaagctgttattaccccctttataatgaatacatttcttgtgagagaaacattgagactatgtaaatatcttatttcctcatcaaactttcacccattattttagcatctactggtatttcttgcctgaaacaatttttactgtgatggctgccaaatggtgatatctaactttcatcattctttcaacatgtattagtttatattctgccttaggggggtttaatctcacttctttccttcctttccttgtttgtttatctgcatgggctcatggattcttatgtcgttctatgggttataatctgtttctatcattatttattttaatgccaaaaaattataatcttgagattatgtcagtaaatactttttttttttttttttgagacagagtctcactctgttgcccaggctggagtgcactgatgagatctcagctcactgcaacctccgcctcctgggttcaagtgattctcctgcctcagcctcccaaatagctgggattacaggtgcccaccaccatgcccagctttttttttgtagctttagtagagactggtccaggctggtcttgaactcttgacctcaagtgatccgcctgcctcaccctcccaaagtgttgggattacaggtgtgagccactgtgcctggccttcgctaatctttgattgctttttgatgcttcaagctgaaaaaattattccttcatagacatgaaaaatattttattcattatattatgtgaaatatatatcaaaaaggtatcaaactgctgggccacatggcgtgattgccgacaagaatagcaactgtgttgggccttggtcctgagggaacacatgacaatgagaagtggctcttttcccctggctggagaagtgacaaataacaggatccaggagcagatgttaagtgctgatgatgaggtagagcagatagtcatttgtggcaggaattgatggcatgtggtccctgagagccagggccatctggatgtctttctgtttgtggagtgagctgggtctggatggaagtgaagacttggctgagccagggaggaatggcaggaagagggcacaggccaagcaggggtgtgaactgcgagagcatgaagcagttgctggagcaggagctgaggcctccttatggatgaatgggaggtgcgtttggaagcaagatgccactattggagtgacgtgggccttgaatgccagactgagcattgccagccagacggaatatcaccatcatcataatctaatcatagtcatccagttgtgaggtcatctgatactggcaatgggtacacaaaatattaaataggatatttatttctaagccaaatttcagaaaacaatttacaaactttttttaaagtataaacatagtgtatgcttactataaaaggaaaagtataaaacattactcaagtatatatagaaaatgagtgggctgctgatccccctctatattatctattgctgtgtgacagtattaccacaaatacagtagctgaaacaacacatttgttttctcacagtttctgtgggtgaggagttcaagcatagcttggtcctctgcaagcttacaatccaagggttggctcaggctgtattctcatctgagcactctactggggagggtttcaggcttacctgatggttggcggcattcagtccttctagactgtcagactgagggccttggtttttgctggtgcactcagttccttgcttcatatagagtagctcacaatgtagcagcttgtttcactaagacagcaaggaagagtgtttcctagtaagacagacactgtagtcttacctaatacaatcatgaaagtgacatactgtctccttcgccatattctgttagagacaggttacagctttgcccagtggcagtatcctagccaatgaggtttatctgaggcatgattattaaaataattgaaaattttcccaatacaccaaagtgacaacttacaacataggttggcaatggcaatttttgacatgtctacaaagactgaattaaaaaaaaaaaaaaaaaaaagaagaagttacaggttctgcccacactcaagaggaagagattatatcagggcgtgaataccaggaggcagggattattaggaaacattttagggtttaactccacaccctcccccgaaaatagataaagaaaacactgcttagggttaccttttttttttttttttttctgagacagagtttcgctcttgttgcccaggctggagtgcaatggtgcgatctcggcccaccgcaacctccgcctccctggttcaagcaattctcctgcttcagcctcctgagtagctgggattataggcttgcaccaccatgcccggctaattttgtattttttagtagaaatggggtttctccatgttggtcaggctggtctccaactcccgacctcaggtgacccacccaccttgacctctcaaagtgttgggattacaggtgtgagccaccacgcctggcctagggtaaccattattaaaagcaaaatttgtggaccatttttctctgcacataccaaagtatagtagtaatttaggaacaacaagagcaaagggtgactgttgagattttgagcctggatgcccaggagagagctctgtgctttttcttgattcctcctaacaataatttgttaaacaggagggagaggacagagcaggtaaatgataatatcagtaactacttggaaatagtgattttcatactgcttttaaaagaggaataaactggtttcagtagatgaccttatcccaagagtaattgagttccccctcacttttgaaccagcaactttaagatttaatttacaatattttcttctgggcatggtggctcatgcctgtaatcccagcactctgggaggctgaggcaggaagatcacttgagccaaggagttggagatcagccttgggcaacatagggagaccctcatctcttttttttttttttttaattaataatttacatgtcttctgccctctgtctctgagtaactgctctcatgttgacaagaaccatattagtatgctaagggtggatgatgtcacttagtggtgtcaccagctgctgccatgtatgttctaaatgaactgtcctcccataggggaatacatacctgtgtgtgagactgggatttatgtagactttggcccagcaggcccatttgacaaccagtggccctcttagtttctttttttttttttttttttttttttgaaatggagtctcgctgtgtcacctaggctggagtgcactggcacaatcttggcttactgcaccctctgcctctgggctcaagcgattctcctgcctcagcctcctgagtagctgggattataggtgcacaccaccacgctcagctaacttttgtatttttagtagagacggggttttgtcatgttagccaggctagtctcgaactcctgactttgtgattcgcccaccttgtcctcccaacgtgctgagattataggcgtgagccaccgtgcctggtgctatacataattttctattttgctcgtaatattttgggttttattttttatttttatttttattttgagacagagtctcactctgtcacccaggctggagtgcagtggcacaatctcagctcactgcaacctccacctcctgggttcgagcaatttttgtgcctcagcctcccgagtagctgggacaataggcacgcaccaccacgcccggataaatttttggatttttagtagagatagagtttcaccatgttggccaggctggtcttcaactcctgacctcaagtgatctgcccatctcagcctcctagagtgctgagattacacgcatgagccactgtgcttggccatattttgagttttatttcgcatagttataccatgcatattctgtttcttaattaattaattaattattttaaaattatttttgagacagggtctcactctgttgcttaggctggagtctcagtggtgcaatctcgtctcactgcaacctctgtccccaggttcaagtgattctctcaccttagcctcccaagtagctgggactagaagcatgcaccaccatgcctggctaatttttgtattttttggtagagacagggtttcctcatgttgtccaggctggtcttgaactcctgacctcaagtgatccacccaacttggcctcccaaagtgctgggattacaggcatgagccaccatccctggccctatttatttatttttgagacagttctgtctcactgttgcccaagctggagtgcagtggtaggatcatggctcactgcagcatcgacctcctgggttcagcctgtcctcctgcctcagtctcctgagtagccgagactatgggtgcatgccaccacacccatctactttttgtattttttcgtagagatgggggtctcactatgttgctcaggctggtcttaaactcctgggctcaagttatccacccaccttggcctcccaaagtgctggaattacaggcacgagccactacacctgacctattttaaaatgtaggatatttttgctgaatgcataattttaatgttcctattgtgattttattaattatcactaatccttcattgtttgattaataaaggagggcaattagatgttagaattttgcagattgtaccagtgacacatggtcccttggctagaattatgcataactttgattgttttgagcaaacaactgtgaggtcagtgacaacaataatgacaaataatattcaagtaacctcttgctgttaatactgggttttgtggccaggcacagtgcctcacgccttgtaatcccaacacttcaggaagccgaagtgggcagatcacctgaggtcaggagttcgagaccagcctggccaacagagtgaaaccccatctctactaaaaatacaaaataattagccaggcatggtggcacacatctctaatcctagctactcgggaggctgaggtaggagaatcacttgaacccggaggtggaggttgcagtgacccgagatcgttccactgcatttcagcctgggtgagagagtgagactctgtctcaaaaacaaaacaaacaacaataaaacaaaacaaaactaaacaaaactgggttttgtctttaactgcctcatggaaacatataggagagttgtgaaataagtattcttattcccatttaacaatgaggaaacagtcttggagaggctagctcccatgtttgatgtgacagtacactaacataagtaagagaagtaaagaatgcagcacattccaggccgggtacagtggctcatgcctgtaatcccagcactttgggaggccaaggtgggtggatcacttgcagtcaggagtttgagaccagcctgtcgtaaatgacgaaacccggtctgtactaaaaatacaaaaattagctgggcgtgatggcaggcgcctgtaatcccagctacttgggaggctgaggcagaagaatcgcttgaacccaggaggcggaggttgcagtgagctgagatcatgccactgcactccagcctgggcgacagagagagactctatgtcaaaaaaaaaaaaaaaaaggcagcacattgggtatttcaacattttagaaaaaggaataaacaaaaccaactgttatacaaatagaaagggaaggactacaggatccataaaatacttacaggaattcttcgaggcaggacagaatcttttctgctgagagaccggggtgaaggcattgtgcaaggaggtggtatttgaaggatgagcaagacttggtttgcatgtgggaacaacatgccaaatagagggaaccacatggcctagactggctgaactggcagcctttattgtgcatacagagggctccttttggctgtgcaaaaattaggataaggttgtgaagtctagaaaatataatttttcatgtctctaaatatttgggttcaaaagtaaaatagtccaatttgcaaaaccttcacgagaaagggacgattgcttaagtcttggtgtttatgtgtcttttttgttattctattttttatatattatttatttatttatgtactttttgagacagagtttgtcactgtgttgcccaggctggagtgcagtgggcaatcttggctcactgcaacctccgcctaccgggttcaagcgattcacctgcctcagcctcctgagaagctgggattacaggcatccgccaccacccccagctaattttttttgtttttttttgtttttttgttttttttaagcgggggacagtctcgttctttcgcccagtttcaagtacagtggcgtgatattggttcactgcaacctttgcctcccaggttcaagcgattctcctgcttcagcctcccgagtagatgggactacaggcatgcaccaccacgcctggctgattttttttttttttttttttttgtatttttagtagagacggggtttcaccatgttggtcaggctggtcttgaactcccgacctcaaatgatctgcccaccttggcctcccaaagtgctaggattacaggcgtgagccaccgcacccggccaattttgtatttttagtagagatggggtttcaccatgctgctcaggcaggtctcgaactcctgacctcaggtgctccacctgcctcagcctcccgaagtgttgggattacaggcatgagccaccacgtctggccttttttgttatattataatttaacatatcctaaacattttctcatcattaaaaagttaacataaacattttattcatatataatatttttatctacttttttttctttagagctctacttctggaagaatctactttttgatttgtggttctgaaattatagcaaattgtgtaatttatcatattttatcacaggctagtatgcattactgattcataccctgtttgcagcttttctcactctgatgcttgtgttgattgttttttccagcagtgcagggtagattatcaactggcttataatcagaagagcttgcttgtatcacagtgagttatacttcactgatttcactgggaaatcttacttcctgagtttccatggttaaagatttgtaatgctcaaatcttcttttgatgtttattccatcagagaaaacagaaactactttgtcttagtgttgccaaattgaaaagagcctttggtttggccaggatctttgtgatagtggcacctggcagtgtcttccctcctgaggagcatccgtgctcacttgagcctctctgatcctagtactgcctgtcagaggcagctggtccacctgagtgccaagctggcgctcctttggagtttcagctgtactaacttttgcttagctgtgaggaatcaaggattttgcttttgcagggggaatttttaacctgtaaactaaactcgcttgctttgaaaggtttactagattggcagattattagtctgattattagtccagtcatatctatctttcaacagatagtttggccatgacttttttttttttttgagatggagtttcgctcttgtcacccaggtcaatggtgtgatcttggctcattgcaacctccgccacctgggttcaagcaattcacctgcctcagcctcccaggtagctgggattacaggcacacgccaccacagctagctaatttttgtatttttagtagagacggggttttgccatgttggccaggcttgtcttgaactccttacctcaagtgattcacccacctcggtctcctaaagtactaggattacaggcatgagccaccactcccagccggccatggcttttttctttttttgttttcagacagagtttggctcttgttgcccaggctgcagtgcaatggtgtgatcgcagctcatttcaacctccacctagcaggttcaagtgattctcctgcctcagccccccgagtagctgggattacaggcacctgccaccacgcccagctaattttttgtatttttagtagagatggggtttcaccatgttggccaggctggtcttgaactcctgacctcaggtgatctgcctgccttggcttcccaaaatgctgggattacaggcatgagccactgtgccccgccaacatgtactgttatttatgttttaaaaagataaaacaatgttcagtattttggtggaacaagcttggtactatcctgcattgtatagagtattacaaaagaaaatctttaggtgtcatagtaaaagatgtcccaaaaggtggagataataatcacactgaaatgtgaatagtcatactaggaaccttgtggttggttttgaatttcacactttcaggaggacgtagacgaaatgaagtgctttcagggtgatatgcgtcccagccagggcatatgaagactggttgaagaaatgtttcacacttggttgataattataatagctgtctccagccatgttccagaaataacataagcctgcttatgatgtattttatatttgaaatgataatggcttccatgtgttgatcacctactttgtgccaagtacatacattatccataaccttttctccaaatctttgaaataggtggtattcttcccttaagaatctggataattagactagcttgcacagctaatttatgctgctaatgaaaggtagacctgggattaaatgttgtgctttttgtactataccatactgcctctggcatgagcatgcagtgaggctgtgggtggtggacacttcccctcttctgcttatgatcaggttaattcctgaaatttaaaatgacattgaatagtcatagtagataatattgagcacttatgtgccgtacacctttctaagctctttgcatgtaatttatttaattctcacaactcagcgaagttgttaccattatcgtctccatcctgcacatgaggaaactgaggcaaggggtgtaggtggaagaactcggttttgaaataggctgtccagctgcagaacccacacttagcccctgtactgtttgatttatgtagatgaccattgtgtatacacaagagtgcaagtttttgtttttgtttttgagacggagtctcactcttgtcacccaggctagagtgcaatggcacaatctcggctcactgcgatctcgacctcctggttcaagtgattctcctgcctcggcctcctgagtaagctggatctacaggcgcgcaccatgcccagctaatttttcttcttcttttttttttgagacaaagtctcgctctgtcgcccaggctggggtacagtggcgtgatcttgacccactgcaacctctgcctcctgggttcaagcaattcttccacctcagcttcccaagtagctgggactacaggcatgtgccaccatgcctggctaatttttataattttatttgagacaaggttttaccatgttggccaggctggtctcaaactcttgacctcaagtgatctgcccacctcagcctctcaaagtgctgggattacaggtgtgagccaccgtgccccgctaatttttgtattttagtagagatggggtttcgccatgttggccaggctggtcttgaactcctgactgcaagtgatctgcccgcctcagtttcccaaagtgctggaattatagtcgtgagccactgcacagggttccagccttagtcttttttagcctacaaaatggcaagtttatatgatttaacctaatatagatcaagggaaggatattccaaaataaactattttttgttttaggaaagaattggatgtattaaagttttgtgttttgaacttctccactgacatacttttcctgtccaattatttgtctgagaagtgtgtattctgtttcacatcgtgtcacttttgcttctccttttttttttttttttttttttgagacagagtttcactcttattgcccaagccagaatgcaatggcgcgatctcagctactgcaaccttcgcctcccaggttcaagtgattctcctgcctcagcctccggagttgctgggattatagatgcatgccaccacgcccagctaattttttatatttttagtggaaatggggtttcaccatgttagccaggctggtctggaattcccgacgtcatatgatccgcctgccttggtctcccaaagtgctaggattacaggcgtgagccatcgcgcctggccaactttttcttctcttacctgcaactaattgatctggcatcttttatatctcttgttataggtagaaagtgattttaaggcattatgctttgggatgtgtgtgtgtgtgtgtgtgtgtgtgtgtgtgtataggtttttgttggtttaaattggctctataacagcatccttcagacaaccaaacctaattttgaagtgtagagtataatttagatcaaatttaagagttttaaaattacctctgattatgggatgacacttgaaaaagtaatcataatacttaccaaaggtttaacaggctacctgcttccagtggagattgtgtgattgtgtttacgaaaaatctgattaactcaagaaagggccattcattgcataccgaattcctaattttttaaaaaaagatccatttaatataatatattcttgggtgaccaaatctgtagcataggaatgacttaatgtgattttttgttggtgggaagacattctaaagggagtcctcaataaactgcatttctaacacacaagaggttcttgtggcctgggggcggtggctcacacctgtaattccagcactctgggaggctgaggcaggcggatcacttgaagtcaggagttcgagaccaggctggaccagtctctactaaagctatgaaaaaaaaaaaactggacgtggtggtgggcatctgtaatcccagctactcaggaggctgaggctggagaatcgcttgaactggggaggtggaggttgcagtgagccgagatctcaccattgcactccagcctggacaaagagcaagactccgtctcaaaaaaaaaaaaaaaaaaaagtccttgtgatgggtttactttttgtcattggtgcctgaccgactattgccttctgcttatttgtcttttagggtcatgcttttattgtctctttgaaattgatcattgagtcctatgagtcctccttatgccttccacctccatttagttagctggtttttcttgcagtctctgggtcctttttgttgttgtttgttttgcatttattattattgttattcatacatttttgagacagggtcttactttgttgcccaggctggagtgcagtggtacagtcatggctcactgcagcctcaacctgctgggctcaagggatcctcccacctgagctttctgggtagctgggactataggcacatgccatcatgcctggctaattaacaaaatttttttttttgtagagatggggtcttgctgagttgtctacactggtcttgaggatcctggcctcaagtgatcctcttgccttggcctcatttattattatttttaattgacatgtaataattttacatattcatgtggtacagtgatatttccttacatgtatacgatgtataatgattaaatcaggataattggcaaatctgtcaccttgagcatttatttctttgtgttcagaacattcaaaatctgcttttctagctatttgaaaatatacaataaattgttattaattatagttcccccatagtgctgtagaatgctagaacttattcctcctattctggatccctttttttttttttttttttttttctgagacggggtcttgctctgtcgcccaggctcgagtgcagaggtgcgatctcggctcactgcaaactccgcctcctgggttcaagccattctcctgtttcagccttctgggtagctgggactacaggtgcccgacaccacgcccgactaattttgttgtatttttagtagagacagggtttcaccatgttagccaggatggtctcaatctcctgaccttgtgatctgcctgcctcggcctcctaaagtgctgggattacaggtgtgagccaccacgcccggtgttttttttttgttttgttttgttttttgagacagagtcttgctctgtcacccaggctgtagtgcggtggtgtgatcttggctcactgcaacctccgcctcccaggttcaagcgattcttctgcctcaacctcccgagtagctgggattacaggcatgtgccaccatgcccagctaatttttgtatttttagtagagatggggtttcaccatgttgtccaggctggtccgaactcctgacctcaggtgatccgcccacctcggcctcccaaagtgctgagattacaggcgtgagccactgcacccaccaaatctggatccttttgatcagacaaagtatattgtaaaacaaagtacgtgttgaaatctcaaagactcaatactaaaacctttgtaactgttacactttccttgcacaaaaactgacgtaaaatctcttaggtttcatagagagatactgaggaatgttccctatttccgtccacacagataggtaccaggatggtagtaaatgtaagtctgatccaactcataagtgctagcttgagatccttgattttatttattttatttattttttattttttttgagacagagtctggctctgttgaccagggtggagcacagtggcatgatctcagctcactgcaacttctgccttcgggttcaagcaattatcgtgcctcagcctcccgaatagctagaattacagatgtgctccaccatgcctggctaatttttttgtttgtttgttttttgtttgagtcaaagtcttgctcttgtctcccaggctggagtgcaatggcatgatctcgacttactgcaacctccgcctcccgggttcaagcaattctcctgcctcagcctcccaagtagctgggattacaggcacctgccatcatgcctggctaatttttgtatttttagtagagacagggtttcaccatattggccaggctggtctcgaactcctgacctcaggcgatctgcctcccttggcctcccaaagtgctgggattacaggtgtgaaccaccatgcccagcccatttcttttgtatttttaataaagatggggttttaccatgttggtcaggctggtcatgaactcctgatctcgagtgatccacctgccttggcctcccaaagtactaggattacaagtgtgagctgctctgcttgacctgagatcctttatttttatttttatttttatctttttaaggatttttccttaaagtatatgaaaccctgaaaacttgtacgactgtttaaaataaacatgttgatttcttcttcctaaagatgaatcacaattgagtcttatttgacctgaagttgttttcattctctctaaacagtaatttgaggaggtaatggcagtctgatgtctcaggctacatttgcacgctagtctttcaccctcagttgtcatgtgttaatgcatgttttgtaataactgggataaatacaaggaacctttgcttttgtttttatttttttcagtaacaaatacttttaagaaaacagatgattttgggtcatctaatgcaccagctgtcgacctagaccataagtttagatgcaaagttgtggactgtttaaaatttttccgcaaagccaaactgttgcactatcacatgaagtatttccatggaatggagaagtcactggagccagaagagagcccgggaaagaggcatgtccaaaccaggggcccttcagcttcagacaagcccagccaggagaccctgaccaggaagcgggtctctgccagttccccaagtaagtatcttcattcttcattgtgtcatggatggctcagttgcttggccacagtgcttgtgttttctgacacacaaagcaggcattaggtttgtctgttccagttgaatcccacaggactgaacatattaagtgatcctctgggctgtgccacggagctgtggccttcctacaggaagcaggaacacctaactgagaattaccttgaaaaatcgcttagcctctgaaggccttgctgcttccagtatgagtggggacagtcaagcaaagggaccttattcagaagccagcaggagaactcgtgctcagagcagcatgggtgccatcgtcccactctcccaaacctgtgcgttttccttgccagcagcacaaaagagcacgataaccaaaaggtgatatgtgattctactgctgggtccaaatgtgaatcctgtttcatcttaagtgcaactgaagatatttataatagcactgtttgttttgcatagaaaccataataggggttaccataaaatctcattttataacttattacagagaaccttttaggaaatatcttctaaagcttacagaaattgaaaaattacatgtttccaggggaatttcagaagaattaatggatttccaataaattatataatcttcccagctttttacttgctattgtaatatcactacctacttcttggcttagaggttttctattaaaatgtgtaggtcttaaatggtatatggaactcctaggacatctggcagtgttcccagtagagtatacaatcaggtttcaggacaggggcagagccatgcagactaaggtgaactctgaccctccgaggggtcaaccttcatttatgctgtcaagactttgtatgtgctgtattatccattaaaaatataatgtgaggccaggcacagtgtctcatgcctataattccagtgctttgggaggccaaggcaggaggatcacctgaggtcaggagttcgagaccagccttacttaacatggtgaaaccccgtctctactaaatatacaaaaaaattagccgggcttggtggtgcatgcctgtaatccgagctactctggaggttgaggcaggagaattgtttgaacccaggaggcagaggttgcagtgaaccgagatcatgccactgcactccagcctgggcgactgagtgagactccatctcaaaacaacaaccaaataagctagcataaactcatgcagattgtatggttctgcttatataaagttcaaaaatgagtaagaaaaataatctatggtatttgaggtcaggacagtagttacctttgggaggaggtgggtaggactggaaactgggcaggagggagtcttctagggctccgaaatgttctgtttcctgatctgcatggtggttatacaggtgtgttcatttatgaaaaagtattggtttatgtgtttatttgtgtgtacttttctgtgtatgttttatgcctcaataaaaagcatgcttaggcggacatagtggctcacacctgaaatcccagcactttgggaggtggatcgcctgaggtcaggagttcgagaccagcctggccaatatgatgaaaccccgtctctattaaaaatacaaaaattagccaggcgtggtggcaggtgcctgtaatcccagccactcaggaggctgaggcaggagaatcgcttgaacctaggaaacagaggttgcagtgagccaagatcgtgacactgcactccagcttggatgacagagcaaaactctgtctaaaaaaaaaaaaaaaaaaagtgtgcttaaaacatatacttggaaatggtaaaaatgcagtaagaatgtaagaaactgcagagagataccaagataaaggattgggctttttacttgaaataatgaatgtaattgagaggattttaatgtttgtttgtttccttttatctgacttacctccaaattaatctccttttcagtcccatggcactaatctaggtttcttctcttgccctggttgttgtggtcatttcttaatcagttttcctcccatcattctttactcactgtggttatccatcattttgccatcggatcgatctttaagagtacagacctgattatatcactctcttgctaaataatatgtaaggacagaatgatgcttctgcaaagcataagttttggagctgggcacatgggttgtgaatcccatctgttgcctcagtcactgttggactctcttcaggtctccagacctcactgtctctgagtgtaaacctgagttcttgtgattagtttgtgagctaatctttttaataagcctgtgtaaacctgagttcttgtgattagtttgtgagctaatctttttaataagcctgtttcaaggcctggtgtggggaagtggatttccttcttccccttgctttctagaatttcatccttctcatccagccatatgtggctgagttgggtacatttgtgtgagctctctagctggattctgagtgctgttggggaggaattatgttgagtcatcttgagtcactacagtatcccatgggctctgcagcactgtagaaacaaccagcactgaaggactggagattatgttgagtaaatggaggtcattgaggtgtcaggagccagtagaaatagcaggtgctggatatcgtaatggattgacatctgggcaggatgagggtacaacactggaagtagagtgcagcctaccccagacagcacaaagccaccagagttaggttgttccaaaggctaaggcttgacaggcaggaggccattgagggacccatggaagtcctgcttgcctgaccatcgtggtgtgtgctctctgtgctaggacatagtgcctctgcctctccctgttcatggtaattgtctgaggagggactttgctcagtataatgcacctgagcgtggggcaggtattcctggccagatgctgatctaccacctggctttgggattcttggttaactgtacttgcatgacttggtttatgttgagtaatatgtgtcagctcacctgagtttgaatacaggctctaccgcttgcttgctccaggaccttgggcagagaacttgcgaaacttcaattttcccatctgtgaaatagagataatagtactacctacctcataactttgttacactaaatgacccaaggggaaatgctttgtaaaatgtctggcctataataaactctgaatacacagtctctttatctcagtgaaagcatttacccaggcagtcagagatctgagttctgaactcagccaaccactgatgagctacaaaaccaatagacaagacattgccattttggtataattaagaagcctgagtgactgattttcttttcttttttctttttttttttttttgagtgattttcgtttcctttcctttcctttcctatcctttcttttttttttttttttttgagtaattgattttctactttcatgtctccctcttgggtctcatgcattatactgacctgggattttattctctctgttaatactgaaggatccttttcaatgggatttggaaatttcttggtgaattggagatttttgtttaccagtttttaaaaataaggcctgctgtatactcactagactagtagggttggacaattataaaatgctttaagggaaacaagagtcttttaaatccctatgctttaacttgttgccaaaaggttttttaagtccttatgttttaatttgtttaaagtggtcctttgtaaaattgatcaatttagcagcagaatgtgccacacagaccactcacccactgtttgatcatttctgtaccctctcagtgagggcacagtctgatcatttctgtaccctctcagtgagggcaggatttgtgcagccaggaaggaatgtacccccatccacatgtcaagtggacacagcctcctagacaacatggcgattacccaaatgtatctcccatgcctcattgctgatacgtttagcagttaccagaccgaaggaactagaccatccatcttgctgtgatccagatggaaaattgaaagcctggccaccagccctgactgtgccactaaccagcaagagcctcggtattatcatatgtggatggggctcagtagacatgttcagtgtttatcacgtagctggctatcaatgagagtgaacatagtagtgtatgctgaagattctgtagtgtggctgccttattctgctgcagctctccagaaggcacccctgttccaggcatcaccccttacctttctcccatcaaagccttgccccagtttgtcagggttttactggatacttgactaatctgataaccaaaaatttgaaagaatagaaccaacttaatagtattgtggtttcacctcaggcttctgagaatgctcttatcagggtggaatttcagacagtgtggggagttcagttggggagacgtttcactgggagacgtttcacagtgggactctgataccaggcagcctgtgttttagtttacaggcagtgtgaacttgacattctgcttaagtgaaaaacagaatattataggatttgtgctgcgtgataatagtaactgtaaaaaagtaccccctttatgctgaatgctctgatttttttttttttttttttttttttgagacagaatctcactctgttgcccagcctggagtgcagtggcgtgatcttggctcactgcaacctctgccttcggggttcaagcaattctcctgcctcagcctcccaaatagctggtattacaggcattcaccaccacacccagctaatttttgtatttttagtacagatggggttttgccatgttgtccaggctggtcttgaactcctggcctcaagtggtcccgaacttgggttctcatggatttctctgatggagattcctggggcttccagcaaaaccactgggactcgaaagtaccctgcagagatttcttggctttggactcctcaatatctgggttggtaaggttgggcagaagtagtagttctggtctgagagtccgtagactgatcttagtagcaacctgccactgttccctttgtgatctcaggcaggtctcttcacagatctgatttcttttctccttccttccttccttccttccttccttccttcctttcttttctttctttctctttctttttttttgtttgtttgagatgaagtttcactcttgttgcccaggctggagtgcaatagtgcgatcttggctcaccacaacctccgcctcccggattcaaatgattctcctgcctcagcctcccgagtagctgggattacaggcgtgcaccaccatgcctggctaattttgtatttttagtagagactgggcttctccgtgttggtcaggctggtctcaaactcccgacctcagatgatctgcctgccttggcctcccaaagtgctgggattacagagatgagccaccgtgcctggctgatctcctcatttctaaagtgatgatgtagagctaggtatgcatgagaccaggccctttcatgtggggagaaaagctcataaacaacgtgagaaagctaagttctgtgttaggaacatgtaaagtgctgtgggaacacagattcagattttgcctgtagggtaggagctggactgttgagaggagaaggtgacatttgagttaggccttgctgtgaattgaattgtgtcctgccttcctccctaaaattcatctgttgaagtcctaaccctcagtgtgatggtatttggcaataattaagtttaaatgatgtcatgaggttggggccttcatgatgggattagtggcattataggaagagatcagagctccccctatccccccatgtgaggatgtagcaagaagatggccatctgcaaactgggaagaggggcctcactgggaaccaaatagtctggcaccttgatcttgtagtttccaacctccagaactgtgagaaagaaatatctgttgtttaagccacatataacataatgttttgttataacagcctgagcagactaacccacgccttaaggagtgaggctagataggaattggaccagaagccgggaagaggaaaagcatccctgtgccaggaataggcatagcaagggttcagaggcatcaaggggaataaaccaatcatctgtccctaaggtgccccttctgatgccagccttctgtaatcctgtcactcatatggttcttctgctctcagccaagcctttagttgcaaaatgaatttagaaggtcagtttagatttgcttttccaaatgaggtttctcagtataccagagtcacttaataaattctcttccagtagccagctcaggctcccttgggtttctttctacttaggtgagttcagtcctgaatacaggttaggctcagaaagaattttctagtgtcaaagagggcctctcctgtgcttattattacttattgctacatctgtttgagtcgtgctctcaccctgggtaaacctcagttttaggccaaagtgagccttggggcactggagtgggcacctcttcattgccatccacaccttttctcatgggactacactggccttatcgcaggaacatgtcctcctccccttaaaacaaaaagagcagtgtgagcttaattagaatatggattatagtgccataacagagagaacaacatagctggctaaaatcagagaagtttatttccctctcaggatgaactgcaagttacccatggtggctgtgctcaggctctgaaggtccccgggccttgctttctccccattgttccaccaggctctaaaggtccctgggccttgctttctccccgtttttccaccaggatctgaaggtccctgggccttgctttctccccgttgttccaccaggctctgaaggttcctgggccttgctttctccccgttgttgccccaggtgctgctcttctttggtgtccaaaatggctccctgccttgcttatctttcagctgctgggaagggaagtgaagggaaagtatgctcctttcttttaaggcacaacccagaagtgccacacatcacttcttgtatccgataggcagaacatctgccacccctctctcaagggaacatggaacatgaactcttcctatggaagaagtggagaaatagtgttgggaagggcactgcagcctttaccacatgagctaagaagaatgcagggcttgaggagggaggggttattggagggccatcctgggttggtatctgggtgggactcatggtaggggactgataggagatgagattgggaaggtagacatggtgaaatgacagtggcagaccctgactaccacttctctgataggcagagagaacccctccaagcccatatctgcttctgtctgcccttgagctaccacccccttgtgcagatcagaacatgctctggtcagtgcttgtcccagcctcgtggctgagctctgtggtgtacaagcagttaccccataggtggtggtgatgctattcttttccctcctggaagcggcggtctgatgacagttgtccctctgctctcataaatcagtgactggatggaatactcaagagtcagctgtatggaggagcaagagggcctctggtatttctcctgatggacacctgcagcttggggagaggacaagtggccatcctggaggaaagcctcaccctgcttaggtgacaagctgctctctgatccagagcctggcaggaagtcactctttgtccaacctagtcagggcagccgggaggaagctccacagccagtacatgctctgtgggtcatggaacaattggtaaagctgtccagagagagagttgacagcagaccagcgaccagcactgctttccagggaaagaatattgcaagcaagataataacagctgacatttgagtacttcatgtgctgggcgctgttccaagttcgttacttgtattgtcttatttagttatcagaacaaaccctctgaggtgggtgctgttatgcctaatttatgcagttattccactgtggtctcagagtgtggttgatatgatttcaatgatttgaattcactgatacttggtttatggccaagcatgtggtcaattttagattatttgccatttgcagatgggtggaatgtatagtttgtcattgctggatttaagtccagtatttctttgttttttgcctcgatgatctttctaatgctgtgtcagaggggtgttgaagtcccccactaaaattatgtgactaagtctttctttaggtctggaagtacttgttttaagaatttggatgctctaatgttggcatattaggcatctataatgcctaatttatagattagaaactaaggtgcagatgagatggattaatttgaaccaatatttacagctctagcaggtggtggagccatgatttgaatctgttgtgaagcccatactctcactttgaggctctgctgtcttttatgattccagggaagagtgcctgtcccaggccctggagtgggagataggagtgcctccctgcaggagacttcctgtgcacctggcagtctggggatttctgcctgttgtcaccttgtctactcctgttcctcagggactcacctgccttagctcagtccttgctgggcaattctctgtgtcttttctagggcctgcaagttctgccactggagtttacaaatgaccactatctttagccagataaccaggtatgccctagcattgggcagttttcctctacatcttgccctctctgtctcaaggatttaggacctagattatgttgctgcttcaggcagttctgctgctgacaagataaattctgttagcatttcactaagctgatgggtataattactttagttggaggtcactaaaacctgaatttacaaataaaaactggatcagggagcagtctgtgtgtgtgttgtggaggagtgtgggtgaaggtacaacagataatatccctcctttgctgagatccttccagtggctccctaaatcactcatagtaaaagccaacttcctcacagggcccttcatcatgttctgctgctagcctccatctgcttctttcccttactcaacctaattctaatttcagttccattggagccatacagatctccttgctatttctttatttcaaattccagttattcattgctggcatatagaaaagcaatagattgttgtatattaactttgtgtcttgtaaccttgctgtaagtgctgttctggcagtctttgttttgatcaattctttgggatattctacatagacagatcatctgcaaacaaagatagtgttatttcttccatttcaatctgtagagcttttatttccttttctggcttattccactcgctaagatttccagtaaaatgttgaataggagtagagagagaggcaccttgctttgttcctgatcttaaggggaaagcatccaatttcttaccattaagtatgaagttggctgcaaagaagttctttatccagttgaggaaattccctcctattcatagtttgctgccccatcagctttttaggttggtgcaaaagtaattgtggtttttgctgtgactttcagtggcaaaaacagcaattcttttgcaccaactgaatagaatgtagctctgtgagggacagggggtgttatctgtctttgttcattgcaatatccctcctccctagaatgtgcctggaacatagtatatgcatggtatctgttgcctaaatgaattgaaaccatggctaataatacggtggtagtcaaactgtgtaaaaatgagttttgtttttatgtttggggaagaccctgttctcaggatcaatgaaaagtaaaaatgactgatagcttttttgaaattcagaaggcatctgaccatgttttgccagtctgctgtctttgggccttgggtttttggttttaaaaatgagtgcttttacaaattggtctaagttctctccagctttcatgtttgttgactttctttctagttgcagggtattttaaaagttaaggagctcaaatacccttaagtcctatgttctctagccagtagatcaactctgcctatagattccaggcttgccagccagtaggcacagcccactcttcctttctgatggttaccaagtgctaatttgggagaggggcctgggttgcagaggagacatggtgctggagagtcagaccaatttgcttttaaatacctatgtgatgtcaggtgggtgatttcacctctctgagcttcagtttcccggcctgtaaaatgggaatgatatacacacaagttgttgtaaggattaaatgagatatttgtggtttccttgcacacaagtgcttagttaaaatggaatctgattgtctaccctgcctcacacctgctttgtggatatcttgattccatatcagaatcacttggaaagttttaaaaatcctgatatccttgaaaacatcatgctaaatgaaagaaaccagacacaaaaggtcacatattgtatggttccatatttatgagatatccagagtagataagcccatggagtcagatgcaggttggtggggctgaggggaagggcttaggggaggggaaatgctgcttaatggtaaagggttttactttggagtgatggaaatgttcttagaactatatcaaagtggtcgtacaacattgtgaatgtactaaatgcaactgaattggttgtttttctttacagctgtatcgagacttaattgtacaatgaactacacatatttaaatggtataattggtgagatttgacatatgtttatacccaactatcaccacaatcaagatagtaaacatattccattccctcccaaactttcctcatgcccctttttagttcctccttcccacctctcccctccccctgagctccaggcaaccactattctgcttactgttacttgtggtgtgttttctctcttttttcttcccccccgagatggagtcgctgtgttgcccaggctggagtgaagtggcacgatctcaactcactacaacctctgcctcctgggctcaagcgattctcctgcctcagcctcccaagtagctgggattacaggcatgagccaccacacccagctaatttttgtatttttagtacagatggggttttatcgtattggtcatgctggtcttgaactcctgaccccagctgatctgcctaccttggcctcccaaagtgctgggagtgagccagcatgcccagatggtttgttttcattttgcagactattgtagaaatggaatcctgcagtgcgcacttgttttgtctggctcctttcacccagcatactttgagattcacttatgttgctgttcgtacctttttttctatttttattttttgagacggagtcttgcactgtcgcccaggctggagtgcagtggccagacctcagctcactgcaagctccgcctcctgggttcacgccattctcctgcctcagcctccccagtagctgggactacaggcgcccgctaccacgcccggctaattttttctgtatttttagtagagacagggttttaccatgttagccaggatggtctcaatctcctgacctcgtgatccgcccgccttggcctcccaaagtgctgggattaccggcatgagccactgcgcccggcctgctgttcctacctttattgctgaaaagtcttccattgtgtggatacatcatgaattatttgtacattcacttgatggacatttgggcagttttcagtttggggcgattacaactaaaactgctatgagtcttcatgtataagtctctatgtggacgtaagtgatgctttctcttgaatgaatatgttgtagtggatggcaaggtcataggatatatgtacgtataaactcttgttgatatctaaaaagtaaggcatggtgaattacttgaaatcctataaatatatttggtaagagaagaagaaacgactggatttttttgtttgtttgttttggagacagattcccactctgtcacccaggctggagtgcaatggtgcgatctgggctcactgcaacctccgcctccccgattcgagcaattcttctgcctcagcctcccaagtagctgggattacaggcatctgccaccacgcctgactaatttttatatttttagtagagacggggttttgccatgtgggccaggctgatctcaagctcctgacctcaggtgattcacctgccttggcctcccaaagtgctgggattacaggcatgagccaccgtgcccggctacgactgaatttttctttctttcttttttttttttttctttgagatggagtctcgctctgtcgccaggctggagtgcaatgacatgatctcggctcactgcagcctccgcctcccgtgttcaagcgattctcctgcctcagcctcctgagtagctgggattacaggcacacaccaccagacccagctaatttttgtatttttagagagacggggtttcaccatgttggtcaggctggtcttgaactcctgaccttgtgatctgcccgcctgggcctcccaaagtgctgggattacaggcgtgagccaccgcacccagcaatgactggatttttcaatggtgaagctattaattttgaaaactgatctcagtagagtggtaggtgggaagctttttagaatgtaattaggaaaaactgtgaagggagaagtttggacagggaggattgacatcttaaggagttttgttgtagagtagagaggataaagttttggtatttagaaggcatgaactgttcatttaaaaataattttatgttatatgaatggtacctcaatttttagaaaaagaatgaaacaagcaacagaatcctggctggatgcggtggctcacacctataatcccagcactttgggaagctgaggcggctggatcacctgaggtcaggagttcaagaccagcctggccgaaatagtgaaaccccatctctactaaaaatacaaaatttagccaggtgtggtggcgtgtgtctgtagtcccagctactctggaggctgaggcaggagaatcgcttgaacccgggaggcggaggttgcagtgagctgagatcgcgccactgcactccagcctgggtgacatggcgatgaaaacaacaaaaatcagatccccaggtgattccagtatgtagccagggttgaggagcagtgatctaagtagagttttgcaaacttgtctgtaaagggccagataataaatacttttcaaccttggggttgaaaggtctctgtcctcacttttcagctctgctgttgaagtgtgaaagacacgtaaccaatgaacatggcatgtttcactaaaatccatttacaatgacgggccatgggccagagtgtgctgagctggactgaaaggctaagtgatggaggcgtggctctgcctccagactggagcaatctgctccagacttcccaggcagagccagacccatcggacatgcttgcttaggagaagaataagcaccccagcattgaaaacaaaatgttaaaatgccaacatttgtgtttaattctagctacaaaagacaaggaaaagaataaagagaagaaattcaaggagtttgtgagagtgaagccaaagaagaaaaagaaaaagaaaaagaaaaccaaacctggtaattttttttcctgagggtttcacttaggtttccttactatgaatggggaggggttgctttctcccattatggcctctgggcctgcgctgagcagaggaaggaccaatagtctcttaccagggcttgtgggctcaacctagtatgggccctggaaggggaggcatccactcacccaggtgttacaaagtcctgctggcattgaaaagccttctcacttgctgccttggccagtgtgccctgctgcaggatggtacagatgaaggcatcgaagtgtaagcagatgtgcaggtgaatgatggtatttgttcacacacacgactcttaaaacacatctttgagccctcttgagaaaggattcccttcttaaaaactgtgtctagccctcacaaaaatgtttagaaaaatctatatattctgacttgggacttaaaggatgccacgttttattcttggtgtatcttctagcttagaaaaacaatcttatcagaaaaagaggagagggtcaatacttaagaggaggtgtttgggccccttcatctgctctccacacctctttttggttgaattgtccctgagcctttgtgctgcttgaaaaggaggcttgttggttggatgagattgattctagaatgcaccagtgttaactagggttattcattccttcctgatcctgttcttccagaatgcccctgcagtgaggagatcagtgacacctcccaggaaccttctccacccaaggcatttgctgttaccaggtgtgggtcctcacacaagccaggggtccatatgagcccgcagcttcatggcccagaatctggacaccacaaagggaaagtgaaagcattgggtaaggaggctcttctgtcctgatcatttgctgatcatttattggaaaatacaagcatacctgggagatattatgggtttggttctaggccactacaataaaacaaataaagctagtcagacataatttttattttcccagtgtttacaaaacttatgtttatactatattgtagtctcttaagtgttcagtagcatatgtctaaaacaatgcatataccttaattggaaaatattgttgtgttgagaaatgtcaagttttttggagtaagtcctcaaaagcatagacaataaataaagaaatggacaagtgggattgcatcaagctgaaaagcttatgcacagcaaactaaacgattaatagaatgaaccgaaaacctactgaatgaaagaaaatatttgtaaactattcatcaacaagagattagtagctggaatatataagaactcaactcaatagaaaaattattcaatgtaaaaattggtggccaggcgcggtggctcacacttgtaatccctacactttgtgaggtgaggcaggtgggtcacttgagcccagaagtttgagaccagcctggccaacatggtgaaacccatctctgcaaaaatacaaaaacttagccaggcgtggtggtgtctgccttgtaatcccagctactcgggaggttgaggcaggagaatcgtttgaatctgggaggcagaggttgcagcgagccaagatcatgccacttcactccagcctgggtgacaaagccagactccgtctcaaaaaaaaaaaaaaaacagtaaaatatgttatatatatacatatacatatatatatgtatatatgtaaaaaaaaaggtaaaatgttttatatatatatatatagatatacacacacttacacacatatatatatgtgctcaacctaatatgggccctggaagggaggcacccactcacccaggtgttacaaagtcctgctggcattgaaaagccttctcacttgctgcattggccagtgtgtcctgctacaggatggtacatatgaaggcattgaagtgtaagtggatgtgcaggtgaatgatggtatttgttcacacacacgactcttaaaacatatctttgagccctcttgagaaagggtttatatatataatttatattttaaaatatatatatatattttgttttgttttgttttgttttgctttgtttttgtttttgagacagagtctcactctgttgcccaggctggagtgcagtggcgcgatcttggctcactgcaacctctgcctcctggattcaagcaattctcctgtctcaacctcccaagttgctgggattacaggtgtacgccaccacgcctggctaatttttgtatttttagtatacacagggtttcaccatgttggtcaggctggtcttgaactcctgaccttgtgatccacccacttcgacctcccaaagtgctgggattacaggcatgagccaccgtgcctggactgttacatttcttaaaactttctttgaaataaaattagtttagttattccatatgtcctgaaaaatgtgacatatgtgttcattagatcaatcttgttttgatgtaatgttcaaaaatttgaactagcaatacatttcattatgttaactgacaatttaaaaaatgaaagctgggtgcaatgtcccacacctgtaatcccaacactctgggaggctgaggcgggtggattgcttgaccccagaagttcaagaccagcctgggcaacatggcaaaccttgcctctacaaaaaatacaaaaaaagttagccggttgttgtggcatgcacctgtaatctcagctacttaggaggctcaggtgggaggaacacctcagcccaggaggtcaaggctgcagtgagctgtgatcatgccactgcactctgggagaaagaatgagaccctgtctcaaaaataagtaaataaaataaaaataataaaaagtaaaacaatattttattgcttaaaaatgctgacagacacaaagtatttgcttttgcaataatggtgtcagtagactttcagggttgctgccacacaccttcaatttgtaaaataatatacaatatctgtgaagtgcaataaaatattaatagttatgcctgacttagaacagtatctgcttcagaacaagcgcttagtaaaagttagctgtgattataactaatcaggcatcaagtgattctgcctctgattatccctggaatcttcctcttcctcattcctcactgtctatagagtttttgtttttgatttttgtttttgagacggagtctcactctgtcacccaggctggagtgcagtggcgtgatcttggctcactgcaacctctgcctcctgggttcaagtgattctcctgcctcagcctccccatagctgggattacaggcgcacaccaccacacctagctaatttttttgtatttttagtagagacagggtttcaccacgttggccaggctggtctcaaatcctaggctcaagtgatcggcccaccttggcctcctaaagtgctgggattacaggcgtgagccactgtgcccagcctgtttgtcttttgagacaaagtctcacgctgtcacccaggatggagtgcagtggtgtgatcatagctcactgcagcctcaaactcgcaggctcaagggatcctcctgcctcagcctcctcagtagctgggactgtagacgtgcatcaccgtgcccagctaattttttttttcttttagtggagatggggttttgccatgttgcccaggcttgacttgaactcttgagtgcaagcaatcctcctccttcggcctcccaaaatgctggtattagaggcatgaaccaccatgctcagcctttgtttacagagttttaaaggtagctctggatacagacagactgtaagccaggtcctgactggatggagtgaggctgaagaacatgttagagttgtcagggatggtggcctgtgtggttcatggggagttgtagctcctctgccactgagttctatgatcttgagtagccactgccgttgggcttcattctctcagtgaaatgaggaagtggagttgagttcactgccaggcagcatgcttcgtttgggctgttactaaatgacagatccaaggacagattggcatcctcgtttccttgccctatgaatgttcttgtttggaggtatgggactataatgtcatttttcattcttgacaatcaaaggttttttaattttataacctaaaatagtaactgttgttttccctttcctcgtagaggaggataatttgagtgagtcctcttctgagagctttctctggagtgatgatgagtatggccaagatgtggatgtgaccaccaacccagatgaggaacttgatggggatgaccgctatgacttcgaggtggtccgctgcatctgtgaggtccaggaggaaaatgacttcatgattcaggtaggcagagcttccaggaaacaggtctagagaagcacaaactggtccttggagggaattttgaggccagcaacaatggcaagtcatagcagagccccagaaacacagcacgaacggcagcagactgagcttctctttttcgtttggcttcctcagagttccaggctgccatacatagtccattgatggagtaagagaggactttagggatcactgagtctaaacctctcatgctctgcttgaggcagctgggacccgcaaatgggaagggccttgcctgtggtcacaaagtgaggagttgaacagcagggactgaaatctttggagtggcagtttaatcttcccatggactcttatcttctctttgaggtaaattttctttaagatccaaagtcatgcaggctggctttataacttctatgtttctttttctttattttcctgacatttgagtctgtcatcttcatctctgagatgtgcctgtggtgggtgggacctccttacctgcttggggaaaccatgcctggccagcacctgcctgccctgtcccttgtctgtaaattgcagttctgggagaggtggcgctggctggctggctcctaagggtgtcacaagttccctgggtgtcttgacagctgcccaactggcttgggaagctgagtttttaaaagtcatggttatattggttaggatttttttttaggggcaagtacaaatattgttgggaaaatagactgggtcctagggctcagaggcagggctgctttcaggctcagaacctggaattccatcttgagggccttggtctgccttgtttcctgcttctctggagtccttttggttcttttttattttattccttgcttattttcttggaaaatgcaaaatggccacctttggcctcgccccaattttacatttttgtgttcaagaggctaggtagaccaaggtcagaatcttagtcccagttctaaatttctgagtaagtaattccagccaaatttagatcagatattagtttttggaacagtcacctgtggccagaggggaaagaggtttgttatggatcaaatgctctcccctggtctagttgtctgatctggtggtagtagagcttacagattatcgacaggggcaaaaagactgcctggggcccacctgtgttatattatagcgttaatgggggttcagggattgttcccagtaaagggggtggctgcccattgtccaataagaatctgtatagcctattgagattatgagaaacaggcccagcccctttggcttgctttctgtgatagaatattatttccttgccctttcagtactgtaggttggcatggcatgggtttggttttttttttctttttgagacggagttttgcacttgtttcccaggctggagtgcaatggcgcgatttcggctcaccaccaccctctgcctcccaggttcaagcgattcgcctgcctccactgcccgagtagctgggattacaggcatgtgctaccacgcccggctaatttttgtattttcagtagagaagcggtttctccatgttggtcaggcttgtctggaactcccgacctcaggtgatccacctgccttggcctcccaaagtattgggattacaggcgtgagccaccgcgcctggcaaaatatttttgttatggtaatttttttttttttttttttttgagacggagtctccctctgtcacccaggctggagtgcaatggcgcaatctcggctcactgcaacctctgcctcccgggttcaagcgattctcctgcctcagccccctgagtagctgggactataggcgcctgccaccatgcccggctaatttttgtatttttagtagagacggtgtttcaccatattggctaggctggtcttgaactcttgaccttgtgatctgcatggcatggatttttgaaattcacttttggatcttgacttaatatacagttacattttttcctctcatctttgaatttgttgtctttatactcaacaatcccctttccttttatttcttgaaacattgggacttttccgtagctctttaaactttcagaacaactagagatgagtagatgtatttgcttttttgccttttattttcccagggcttttagaaaacacttttattttgaaataattatagattcacaggagattgtaaagaggtgtacaggagagtcccatgaattcctctgctggtcttcctcccatggcaaaagcccataaacccacagtaggatatcaaaactacaaaaccatttgacattggcataatcactagagcttattcagattttatcagtgatatacacatactcatttgtgtgtgcatatagctctgtgtgctttcattacaagtacagccttgtgtaatcactcccgcaatcaaggtactgaggtatactaagaccatgagattccctcctggtacccatactttgtagccatacttatccctaaccctggaaacactaaactgtttcaactgtctataattatgtaatttatgattcttggttaatggaatcacgtggtatgtatctttttgagagaggccttttttactctgtataatatccttgagattcatccatgttgttgtgtgtttcagtagtcatttattcttattgtccggtagtattccatgctatggatgtaccacagtcgtgctctttttgttaatagaactaaagcaactctatggagctaaggtaactgggtacagctgagtagtgatttaaagtttctggagtgttttcagaaataccatctcacctctaacaaggcgatctcaagtcacttatttgggaaaacaaaattacgaagatatgatttctttcattgttgtagaaccattaaataagtcatcagattatgatttgaacccagggcacccagtcaagtgctctttccctatgcggccttagctacggggatttacatttacagttgagaagtgaaacaagaaaaatttgtttttgaaacataatagtaccatctagcctggctgaccaacccttccccagcaccaccagtggacatgcgcatgtacatacacacatacatacccacactttaggctgagggagagtcttgtctttttgaatagccttcatagtaacctctgggattcaagggtacctgatatttaagacctttattaaaccttggttcagtggttttcaaacatttttgaatatcagaaccccttttcctaatggactgtttcatagaaccccaaaatgtgtaacaggtaacagcaatagttttgaaagttcaaaatggataatctttacttgtgaggtcggacatgtgaatggtgggcatattcccatgattctaatatgctgtcagaattatgagtgacagacagttgctgacttggagcacttcagtggctcatttgtttttctctatttggttatacaacagtgagacaagcgtgatgcacatggccattgtcagggtgacttttcctgaacagcatgctgtgtagttactttgattaatcagagatgggaggacaagctccgttttgaggtcaacataatactgagctatcctagcaatacaaaattatgtgtggtggcgggcttcattgtcttaacatatggcttggaacatgtttgagtgtgcatctttttttttttaattgtcctaccttaaaaacacacacattttgcagactctctgaagccctgtggactactattagataattgttggttgggcatgctgtaatcccagaattttgggaggcagaggcgggaggattgcttgagcccaggagttcgagaccagccctggaaacatagcaagatcctacctctacaaaaaaattaaaaaattagctgggcatggtgatgcatgccagcagacccaactactccagagactgaagtaggatgatcacttgagcctgggagttcaaggctgcagcgagccctggttattctgttgcactccagcctgggtgacagaatgagaccctgtccccaccctcccccccaaaaaaaagaaaagaaaaaaaatgttatataacatgaagactatcattttttagtagattttttttaagtttgtttttaaaaggatgttgaagatctttagtttctactctgtcatccttgagcatatgctcagttccaggccttgttagtctgacagatttgccctttatctgcctgttaaaatcttcagtgggtgagtaatgaatgtccctcctggcagggctattctgtctaacagtatgtaacccatttctgatccactctggtactttctctattgacttttctataagtagcaaggatcttggtgtgtttgagggtagaggttaatatgccattatgtgctatatgaagaaactaatttcggggcaattggggccaccatgagcatggcagagtcaggagccaacttgatctcctgcttcccaggctccacaagaccttgtgtctcaagctcacttcagagcttcttggcttttgttccagaggacttttctgtgctgtccacctgaaccaagagtgcccacctggctttgtgttaaggagggacggtttctgactgtcctgtcactgtgagcaacgtaccttttctactcaataactttatcaaaaggcataagtttagagggagctagctagaacaaatacagtttaaacttttaaaatgtattcaccatctaattaggaagacaggaataaatttttcttaaatctttaccttaaattgatattttgaataaccctagaatacatttagagtgtgttttctagaagtgcatgtattactatagagaaataactttttggatcattgtcattatatgagtagtatcaacattgttcatgtatatcactattttatcttatttaccagtgctaatttaaatcactggaaggttaaaatcctacttaataaatacggtatttgagaaatctggctaccacataaaaatgaacaggaaatacatttgatatttaaattattttaatcgctgtagagcatgttttgttaagctttttcttaaatggctagataataaatttttaggttttgagggccatatggccttgttgcacctactggattcttctttgagcagctgtaggcaatatgtaaaacaaattttcacctgtatggttggctgcagtggctcacatctgtaatactagcactttgggaggctgaggtgggcagatcactttaggccaggagttcaagaccagcctgggcaacgtggcaaaccctgtctctacaaaaaatacaaaaattagttaattgtgatggtgcacacttgtagtcccagcttctcaggaggctgaggtgggtggatcacttaagcctgggcagtcaaggctgcagggagatgagattgtaccactgcactacaacctgttcaatagagtgagaccctgtctcaaaaaacaaacaaacaaaaacccctaaacaaatgcgtatggctgtgttcacataatactttatttacaaaacaagtcaagctggcattggcacatgggctgtagtttgctgacctttgccctacaacaacaagtattaatatgtattaagtgtccaactccagtaaagattttatagcagttttaaaaagaagcccattttaatggcctagcactgtggctcacacccgtaatcctagcactttggaaggctgaagcggaaggatcacttgagtccaggagttcaaaaccagcttgggcaacatagagagaccccgtttctacaagaaattaaataaaaattaagtaaataaaaatttaaacaaagaagcccatttgaaagttttggttattttaaaattcatattatttgttggtacctaatgcactgacataattcaaagtccagaaagcacacagagaaataccttatccccaccttatccccaactacccattccgtagagtcagcccttatcagtttcttgtatatccttccagaaacattctatggctaaacaaacaatagcaaatgtattgtttccttttaaaaattttttggtaaaatacacataacattaaaagttaccctttttatttttatattttcctattttgagacaggatcttgctttgtcacccaggatggagtacagaggcacaatcacagctcatggcagcctccagctcctgggctcaagtgattgttccacctcagccttctaagtagctgagactacatgcacacaacatcacaccttgctaatttctttaatttttttttgtagagatggaatcttgctatgtttttcaggctggtctcaaactcctggcctcaaatgacccttcctcctcagcctcccaaagtgctaggattacaggtgtgagccaccctgccctgcctaaaagttaccattataaccatttttaagtatgcaagtcagtgatgttaagtacattcacattgctttgcaaccatctctttgtctaaatgcaaatgtttgcattttatgtatagtattttcttttcttttcttttcttttttttttttttttgcgatggagttttgctcttgtcgcccaggctggggtagtgcaatggtgtgatctcggctcactacaacctccacctcccaggttcaagtgattctcctgcctcagcctcccgagtagctgggattacaggcatgcaccaccacgcttggctaattttgtatttttagtagaggcagggtttctccatgttggtcaggctggtcttgaattcccgacctcaggtgatccgcccacctcggcctcccaaagttctggaattacaggcataaaccactgtgcctggccgcatgtatagtatttttaacatcttttttcatttagcaatatgtaaattaaaaaccattttattttctgcataatggttggatcacattttattttactttattttattttatttttttgacggagattcgctctgtcacccaggctggagtgcagtggcatgatcttggttcactgcaaccttcctctcctgggttcaagtgatcctcctgcctcagcctcctgagtagctgggactacaggtgtgtaccaccacacctggctaattttttgtattgttagtagagatgaggtctcaccatgttggccaggctgacctcaggtgaccaactcctgacttcaggatatcctcccgcctcggcctcccaaagtgcggggattatagacaagagccactgcgcctggcccatttttcttttttttaagctatataaatatttgatccacctgaaattttgccaggtatatagtgagaactatggctccccattgtactaataccatacctcactgtttgaaatgccacctttatttacttcatttctaaatgcatttgaatccttttctggttctctctttcagcgattcatctgtctgtatatttgctcgtacaattctattttaattattgtacctttataatatttttaaaatatctggtatggctagtgtctccatattgctctttctttttcacacatttcccagctgttaattttagaattttttctagttctgaagctattaatttattattttattgagactttttttttttttttctgatatggaatctcgctctgttgcccaggctggagtgtagtagcgtgatcttggctcactgcaacctccgcctcctaggttcaagcaattttgaacctgcttcagcctcccaagtagctgagattacaggcgcctgccaccatgcctccctaatttttgtatttttagtggagatggggtttcaaacatgttggccaggctgatcttgaacttctgaccttaagtgatccccccgcctcggcctcccaaagtgctggctgggattacaggcatgagccactgtgcttggccgggactacattctttttataaattaacccaaggataattgatatccatatgttaactcttgctgtccaggaacagggtgcactgtacattgacttaagtctctgtgtgtgttcttcaaatagtatttacattttttttttttttagagaggcaatacatgcttatggttattcttaggtattttatcttttagtttgtttattattctcattcatttcttaatttaaaggaataatgtgttttagctacacgcacatggaaaaagttatcattggccaggcgcggtggctcatgcctataatcccagcactttgggaggccgaggcaggcggatcatgaggttatgagatcgagaccattctggctaacacggtaaaaccccatctctactaaaaatacaaaaaattagctgggcatggtggcatgtgcctatagtcccagctactcaggaggctgaggcaggagaatggcttgaacctgggaggcagaggttgcagtgagccgagattgtcccactgcactccagcctgggtgacagagtgagactccatctcaaaaaaaaaaaaaaaaaaaagttaccattttgaaactgaactgtatttgattcatttttggtgaatcctggttttcaaaacatgaagtcattggtgagacagactttcatttttttttttttttttttttttttgagacggagtctcgctctgtggcccaggtgggagtgcagtggcgcaatctcggctcactgcaagctccgcctcccaggttcacgccattctcctgcctcagcctcccgagtagctgggactacaggcgcccgccaccacgcccggctaattttttttgtatttttagtagagacggggtttcactgtgttagccaggatggtctcgatctcctgacctcgtgatccgcccgcctcggcctcccaaagtgctgggattacaagcgtgagccaccgcgcccggccgacagactttcatttttaattgttagtctgttttctgctactgaccgcctttttgtcactttacatatcttctctgagccttagtttcctcatctgtaaattgaagaatctaaaacagatatctaaagcctgtcttcccgctctgcccacattgattctgatgtgattaacttcctagaggccttatatctgctcagggaagccctcttgatgccaggacctatgtgactcccagtggttgaggaccatctgagctctggatttctagtcccttgtggccaggctggtgggccaccatcaaggtcatgtcaggaagctcactgtccaccttctagggctaatttgtttggttgggtagttaaaggtttagggtcctggtttggaattgcttgaagtgccctagtatctcctcgggagttcgcctttccttttcattccctcctctggacccttagctctcagacctactatcctcaggctgtccacatgtctcccagtgcaaccctcattgtcaactccctcctttccctctctgccttctggccctctccccctgtcccctcaatactcagggaaggaagtggagccttgggttgaaagaactggtttagcaacgagtcaggttatgttcttatccacctttgcctttcaatagctatgtgatctttggtaaggtttagagagaataaatgcaaagtactaacccatgattactccagcaggggtcttagtgaattggtttgctcattagtggttaatagtattaatagtagcttattacataaagctatgtgctgggctctgtaataggagcttttacatatgacccattgaatcttcacaaacagccccaggaggagggtaggaattgtgtatcccattttgcagatggggaaaataaagcccaggagaactaacctgtgcaaagtcacacagctaatgagtgtctgagccataattcaaactcagctttaagatgtcactcgtgggactgaggaactgaatttttagcttaccttgttaatttcaatgtagagccacatgtggctagtggctaccatactggacagtgcagttccagatgtgtggcagcagctcagttccacgttagtcaggagggagtgctccttcctcccctctccttctatcctcccatgcccctcccctcagcaggtgggtcttacttttggatggagaacaccttctgagtttaatttttgttgcttctttaattctaacagtgtgaagagtgccagtgctggcagcatggggtctgcatgggattactggaagaaaatgtgcccgagaaatacacctgttatgtttgccaagaccctccaggtagagatttctggagtcagggatataacagtatgtagccttttccttggcacagctggctgtgacacattctaaatgtctgcggtcttgagactcatttcttcagcatcggctagactccagctcctcctcgcctctgttgctatcctgccttgtggccagctatcctgaacgtagcaataagagcacacgtgtgaaggggcccacctagtggaaggcctggccttgagctagaacttttccttttctttaattatggtttaaaaaaaatgcatgaggccgggcgcagtggctcacgcctgtaatcccagcactttgggaggccaaggcgggtgaatcaactgagatcaggagttcgagaccagcctggccaatgtggtgaaactccatctctactaaaaatacaaaaattagctgggcatggtgacaggcgcctgtaaccccagctacttgggaggctgaggcaggagaatcacttgaacccaggtggcggaggttgcagtgagccgagatcatgccagtgcactccagccagggcaacaagagcgaaacttcgtctcaaaaaaaaaaaaaaaaaaaaaaaagcatgagatctaccctcaacaatacagtattgttgttaataactataagcacaatgtcgtacagcagatctccagaactttcatcctgcctgattgaagctgtgtagaaaaatgtagaaacttcacaagtttgagtgtcatccttgtgtaggggccatgctaatcttctctgtattgttcctgttttagtgtatgtgctgccgaagtggcaccttttccttttcttgaggactcatgaggatgggcgtgtgggctctgtctttggcttttgggggctattggagggttagaaacttgcctttgccccctgtggcaacatctgcccttcatcacatcactgccatcctgaagggagaaatgcccttgaggggaaggaggaaggcatggttgggtagagcctgttgccaccctgagcagtgacttaattccttagcaggatcagttagttccatggctataggggtcacctgtggctcttgattgctcctttctagaaggggtggattgtaaatatgcagttcattgtcttggtttccatgggatggtgacattgtctcccattaccacttgtaaggttctccctcagctctagtcccctgattcctttagagctagacagtgcttgagagcctctgcttccgttactcctttctgtccgataaggtgggcctggttctcctactcccagttttgcttatgaggaagaaattgatccttgaggatacagttgactttcctcataaagcaaattggaattagaactggtttgcagagccagatctcttgattttgttggttgtctagggagggactggccaccagttcatttaacagcatgcaggtcccctctgggcctgaaggcctctgttgtgacactgtctccttgtactagaagcatctgcctccacttgtccctttatcccaaggaaagaatagtcagaagatttgacaggtgaacaaacacaagtccagaagggacatgactggcccaagatcacgccaccagctaatgccagacaggcgatgagaaccagttgtctcatacctttgccttgtaaaacaggtagtgcagctctgaatcctgctgctctaggcactgcctgcagcagctgcctctggggttcccccatatattcctgaaggctccttagcataccttttaaaaatctttttttccctactgtgtctttctctctacttttccttctttagaagtcacacacaccatcttcatcaaatcctgtgcacttactgaacttctacgactttaatcgccaatactgtgaatagactcttccttgaactgagcacagcatgtctgccacagggtctacctttatagactgactctgcagagggctggaccaaaagtttaacagattcgttttttaaaggctacttaaaaatagttttaacagaatcaaggtgtatccccaccatgtgtattagtaaagccagaagtagctcaaagaccttaataggaatcacctgggtgtttcaaggtttttatagatattgacagtcgaacaacagtctggtagaaagcttttccctgggactttggagcaggtcatgttgataagtcacatgtgcttttgttttcagtccttcctaaggagccctgtaacaaataggatggctgaagccatccagttcctatgttgttctaatgaatggataacaggtacagagaagggaaggggcctgatcatctgttgagttaggtggtagaaggtacatttgcagggggacttgaggcatctttccattcatttgataagtccattcaagatgccttttgccaggcactggggatacaaccatgaacaagatagttcctactctttcggctcttaattgggttgggagccagaaacagaagttaaaacaagttaagtaaacaagactgtgtaaggtagtgatgaatgccgtgacgggaaaattgataagacgacttgaggcactgatgatgctctcaactttgggaagtagcagaaggccccactcctgggcaacatggcaaaaccccatcaaaaaaaaatgaaagaaagaaagaaaaattagccaggcatggtggtgcacacctgtagtcccagatactcgggaggctgaggtgggaggatcacctgagcccagggaggctgaggctgcagtgagccatgatcatgccactgcactgtagcctgggcaacagagtgagaccctgccaacaaagcaggaaaaaaataaaagcctttctgaggaggtggtaaggagccaaccctgcaaaggcttagggaatagtgctgcagacagaagggatgcgcaagtgaaggtcttgaggctggaaagagtttgatgtgtttcagaaactgaaatgaggccagtgtaaaggtatggaggggaagacaggaaggaactgggtcctgtgggcctcagtaagccagagttagagagttggggctttgggtattctcctttgagcagtaggaggcagtggaaggttttaagtaggggagagaatattatgatataaatttggagataatctaggtgcccagctcacctctggccagttccaggaaatgaggaagtacatgccttattcactaccttatccccactacctaatagagagcccagcatatggtaggtgccaagaaaatgtacactggatgaataaatgaacaaaatgagtatactaatctgttcttccagtagttggtatgataattgtgtgagagtgatgaaatggcctgggtttccttcaggccttgttttaaccctcttgttgtcactgctgtaggtcagaggcctggcttcaagtactggtatgacaaggagtggctgagcaggggacatatgcatggcctggcatttctagaagagaactactcccatcagaatgccaagaagatcgtggccacccaccagcttcttggtgatgtgcagagagtgattgaggttctgcatggcctgcagctcaagatgagcatcttgcagtaagtgtggcacctgcagtgctgggagcagtctgtttggcatggtctgggggctgagtaaatctgagaaattggaaagctaccaaagcaatcaaatcataaaactgagtttgagacctttactaaaaattatcagtttcaggataaacattctttaaaaaaaaaaaaactttattgagtaatatcttacatataattaggttcatccactttaagagttcattgaggccgggcatggtggctcatgcctgtaatcccagcactttgggaggccgaggtaggcggatcatgaggtaaggagttcgagaccagcctgaccaacatggtgaaaccctgtctctactgaaattacaaaaattagctaggcgtgctggtgtgcgcctgtaatctcagctacttgggaggctgaggcgggagcatcgcttgaacccgggaggcggaggttgtggtgagctgagatcgtgccattgcactccagcctgggcaataagagcgaaactccgtctcaaaaaaaaaaagagttcattgaattttgacattgtatgcagccgtgaagccaccaccagaatcaatacatggtgtgtgtattttggtttgttttttgttttggcatacagttctgagtgtttttttttttttttgagatggagtctcactctgtcacccaggctggagtgcagtggtgagatcatggctcactgcagcctccacctcctgggttcaagcgattctcccacttcagcctcccaagtagttgggactacaggcgcatgccaccatgcctggctaattttttgtgttttctgtagatatagggttttaccatgttggccaggctggtcttgaactcctgacctcaagtgatccacccacctcgggctcccaaagtgctgggattacaggcacgagccactgtacctggctgagttatttgtttttaattgctgtaagatatacataatataaaatttaccatcttaaccattttttttttttttttttttgagacagagtctcgctctgtcgcccaggctggagtgcagtggtgtgatctcggctcactgcaacttctgcctcccagattcaagtgattctcctgcctcagcctcctgagtagctgggaatacaggcgcacgccaccacacccggctaatttttgtatttttagtagagacagggtttcaccatgttggccaggctggccttaaactcctgacctcaggtgatccacccacctcggcctccgaaatttctgggattacaggtgtgagccactgcacccggccccatcttaaccatttttaagtgtacagctctgcacagttgtcattcatgttgttttacaaccagtctctaaaacccttgtgaaactgaagttctataccctttaccaacagctctccatttccctttccccaaagcccctgacaaccagtattctactttctgcctctctgaatttgacttctctagagacctcatgtaagtggagtcatatagtgtttgtctttttgtgactggcttatttcacttagcatagtgtcctcaaagttcatccgtgttatagcatatgtaagaatttcctccctttttaaggctgagtaataacttgttttatgtgtatgccacattttgtttatccctttcatgctaaatattccttttttttttttttaacaagagatggagtcttgctttatttcccaggctgaagtgcagtggctactcacaggtgcgatcatcaagcactgcagcctcaagctcctgggctcaagcaactcagctcattcttttttttttttttctgagacagagcctcgctctgtcacccaggctggagtgcagtggcgtgatcttggctcactgctacctccacctcctgggttcaagcgattctcctgccttaaactcctgagttgctaggattacaggcacatgccaccacacctggataatttttttttttttttgagaccgagtctcgctctgtcacccaggctggagtccagtggcatgatcttggcttactgcaagctctgcctcctgggttcacgccattctcctgcctcagcctcccgagtagctgggactacaggcgcctgccaccacgcccggctaatttttttgtatttttagtagatacagtgtttcaccgtgttagccaggatggtctcgatctactgaccttgcgatccacctgcctcagcctcccaaagtgctgagattacaggcatgagccactgcgcctggcctaatttttgtatttttagtagagatggggtttcaccatgttggccaggctggtctcgagctcctggcctcaactgatctgcccatctcggcctcccaaagtgctgtgataacaggcgtgggccactgtgcccggtcggtctcttggctgttataacctaccctactttaccaaatacagcaacagggccttgagtggggtaggcctcttccatggtttccatgggtggagcctggactagaatccaaatcctggctctgtcaggtacttttcgaactgtctctctatgtgatactgcatgaccttgtgagctttcttttggttttagtatagtctgtgtcagggactgcttttatttaagttgtaaacagtggcagactagtgcgatgagtgagttaagacttgataggctgctcctggataggatttcctttgtgctgatcaggcctagaggaggcctggtgtcaggcagagtggagtatcaggaccctgagatggtgagatgggaatctgcttcctcttgtgctctctggcacacagaggcctggcttcaagatctgcgtgacaaaggtggtggaggagggaacattgggtctgcgttggtttgggtaaaagctgaggtgctataacaaggaccccccacatagaggctcaaacaaaacagaagtttctttctcatataaatgaatggttcaaggctaggcagggatctaggctaggtaggagacctttctccaggattccatccgttgggttgggaactttgtttccttctgtcttacggctccagcattctcttagggttccccttatctgcatggtcttaggttccttttgtcttattgctctggcattctcttgggataccccccatttgcatggttgaagcagtttcacctgcatttcagctctaccccagtccccaggagggggaaaagagagaaagaagagggagggcaaatagtttcatggacaggcctaatggcagggcaggctgggcaggtggccacaggccctgcttatacttagaagtaggggtgggggtggggataaaaggaggagaggttggatgctggggcaattagcagttgctgtggcagaatctgttgaggtgaactgaaccaaatgacggccctggataggatgtcagagactagctatttcctcacatttcataaaacaggaaaacgtaaccccatgtaaaccaaatgaatttgtttttaatgagatggcagcaattaaatgaagtaggtggatggtggtccacgtgagtgcctgggaaacctcaggggctgctcctgattgtaaacttagctatatttctttaaaaaaaaattttttttttttaagagatggagtctttctgtgttgcccaggctggtcaagtgatctacctgccttgccctcccaaagtgctggggttataggtgtaagccactgtgtctggctcatatttcttttatttttattattttcttctcgacagtcttaatagggctgaactttttaaaaataataattgttatcctcccacctcagcctcctgagtagctgggactataggcgcctgcatttcttttcatttgagggttctgtcagatgctgttctcttttttcttacagaaatgccagtgttcctggccctggcccatattctgaagccttgccctttctttttttatgtttttgagacaagggtctcactctgtcacccaggctggagtgcagtggtatgatcgcggctcactacaacttctgcctcccgagttcaagcgattcttatgcctcagcctccccagtagctgggattgcaggcatgtaccaccgcacctggctagttttcatatttttagtagagactgggttttgccatgttgcccagggtggtctcgaactcctgggctcaagtgctttgtctgcctcggcctcctaaagtgctgggattacaggcatgagccactgtgcctagccccttgtcccttctgaatcctcatctagatcctccatctttagagaaattactttgtttgtagtagaattaaatctgtcttctagcaattcagaagagggcataggaagatcttggtacttcttacaaatggagaaaagatcctgggaaaggggaaggtggccccagtatgtctctgtattcatggatggtctctgttgtcatgggctctgggtctttattctcagaaatattgttccccagtgacctggtgaatttattttcgaagacaaacaataaaactgggagtaacttcagagcatctgtcatcataaaaaacatggcctggatggctgtgcttaccttcttcatgactgacagggcttacaaggaaatggcagggtcatgcttgcgagaagtagcaccttcagatcgcagttggaaggatgaaaattgtaggtgggaggaagcagagactttaatggtttttttaataaagagcaggtctgtactatggttcgtgtgttccatgttaacaggtagtggacctgaaagttaacaatgactcccatttcccctgagcagttttagtggtgtgtctgggtcctgggtaggctcctgggacaggctgataccctgtctggaggtatcccaaacaattgatgccaattgtttcccctcttccttagtggctagcagtggtatgggattgctggagtgggagagctgagacgggatagttgcaggcccttgggagcagaattttagttctgtaacatcgctctatgccttcatgtatatgaccacttccactttcacaggaaggtacaggaaggcatccacagcattttatgtgcacatacatggaggcacagctttcagtagatgctcacaggagtctggccctaaaaaggataagaatccctgttcttttctttaataacaaacttttttctttggaatggtgcgaataaattttcagaataatttttagaagctttatcattaatgacctatacataaaggacagttgattttatttttttaacccctgggtaatcattgcatttttgtaatcaaatgccattacatgctgggatcattgtgactgtttattaataagttaaggttatttttagtaagtcacatttgaagagcactttaccaccattaattcacttaattgttatgaaactcagtgtttgatggtgttggcaaaaagagtcaaattctgtaaaatacttgaagatatttattctgagccaaatatgaggaccttgacttgtgagacaccctcaggaagtcctgagaacatgagcccaaggtggtcaggctacatacagcttggtctcacacattttagggagacataagacatcaatacatataagaagtacattggctgggtccagaaaggcagaccaacttgaggggtgggtgggcttccaggtcataggtagattcaaagattttctgattggcaattggttgaaagagttaagttattatctaaagagtcaagttattatctaaaggccagtcgccaggcttggtggctcacgcctttgggctcccagcactttgggaggtcgaggtgggcggatcacctgaggttgggagttcgagaccagcctgaccaacatgtagaaactccatctctactaaaaatacaaaattagctgggcatggtgacgcatgcctgtaatcccagccacttgggaggctgaggagggagaatcgcttgaacctgggaggtggaggttgtggtgagccgagatcgcaccattgcactccagcctgggcaacaagagcgaaactccgtctcaaaaaaaaaaaaaagaaagaaagaaaggagtgtctgggttaaaataaggggttgtggagaccaaggttcttaccatgtagatgaagcctccaggtagcaggcttcagagagaatagattgtaaatgtttcttatcagacctaaaaaggtgccagactcttccttaattttctcctggatcaggaaaggacctggaaaggaaaggaggttctctatagaatgtagatttccccacaagagacagcttccagggctagttcaaaatatgtcaaagaaatatattttggggtaaaatactttgatttctttcagtacctgctatctgttatgttggtatcttaattgctacagtctgttttgtcagtctgagggtctctattttaatgttttgttgttgttgttgttttgttttgttttgttttttgagacggagtcttgctgtcgcccaggctggagtgcagtggcgcaatcttggctcactgcaagctctgcctcctgggttcacggcattctcctgcctcagcctcccaagtagctgggacaacaggcacccgccaccacgtccagctaattttttttgtattttagtagaggcggggtttcaccgtgttagccaggatggtctcgatctcctgacctcgtgatcctcctgcctcggcctcccaaagtgctgggattacaggtgtgagccaccgcccccggcccgttttaatgttaatgctggtcagttgtgcatgaattccaaagggagaagggtataatgtggcttgtctgactcccttcccatcatggcctgaactagtgtttcagtttaatgttggaatgctcttggccaagaggaggggtccattcaggttggttgaggggcttagaattttatttttggtttacaatagcagacagatcagacagataattagcccagtttcacagaggaggaagtaggaatgatgctggttgagtgagttgtcccagagttgaaatccagtcaggtcttctgactgagagtccagtcccactcactgtgtgtgaccacagtgggagctcactaaggagtggtctcctaggagaccacggattcacattcgctcttgtttagcaaatggtagtgtgtggtcagatggcccaggtggagctgctgtccctactgggagagtatttaggaattgagaacccctgcaatggtgccagttactccaaagcccatgtcctctttgtcctctcaacagaagccgggagcatcctgatctgccgctgtggtgccagccttggaaacagcactcaggggaggggagatctcatttcagaaacatccctgtcactgacaccaggagcaaggaggaagctccaagctatagaactttgaacggggcagtggagaagcccaggcccctggccctgcccctgccgcgttctgtggaggaatcctatatcaccagtgagcattgctaccagaagccccgcgcctattaccctgccgtggagcagaagctggtggtggagacgaggggctctgccctcgacgatgcggtcaaccccctccatgagaacggcgatgattccctttccccgcgcctgggctggcctctagaccaagacaggagcaagggggacagtgaccccaaacccggctccccaaaggtatgtggctgccttgtacttgttcttcattcattgcgtgaatgcttgcaagttatcctcctagtttgaatgctctatggaagatatttattaataaaactgtatttaaatttgcttaccatagatatgttttggtttgccaaaatgggtgcaaagtcaggagagcccacttaagccaaagatccttggttccaggaagcacccacaaaatggcatagtcaagtgtggcacgtggggtggggggcgcgggtgcagagggagggagaggtgggaagtagcaaggagatatggattagcaaaactcatcttttctttaaggcagtttgcattataattgcacctagatgttaattcttagcatgagcaaacaatgagtcaaatgttttgttaggcagaattttttcaatccagttgtatgatagctttattttgacttttaactttgaagccctgtggtaaaaatggtacactttgtcaaaatattgctggtttcatcagttttcccaagagccacttttggttttttgttattcaagtcattctcttctagaacccccttgtatcacctcgttgccggtgttttcatctctaactgctcactaggctcattgtgccctgtcctcagttgtcagtgaggctttgtatgatttgagagtttctctgtctcatcatccttacttcccagactttctcctgcaggttggtgtcaccagtgttaaatacattgctgcatggtgccaaggggatcctagattacaagcccctcaagggaggggattgtatctcatgcatccttgtgcccttgactatgtctaaacggtgttgggcaaggtggtaagaacacagtcttttgagacagacgcagtttcaattctgagctcagccccttactgtgtgattctgagcgggttacttcactttcctgatcagacctgttttctcgcctgtagaatggggccagtgaagccccctcagttactgtggaacatatttgtgaaaatccctcagtaaaatccctcagttttgcacatagtaagtactaaataaatattggctagaatctatttcatttcaaatggatgaatgaaaggttgagttaccaaatcctagaaaaggtttgtggtcctgtggatcaggcaggtttcctagaggtatctggcacataaaacaaagccaggaaatactgggcctcagcaaagcaaccagggctaacagtcttttccattgatggtaagctgactgtaagctggccttgcttttatgtgccttaccctatttcatcctcatgaaccttccaaataggttttagtacccccatcctcccaccgagaaagcagaggctcagagacatgaagtagtccatccagactcgcacattcgcaggagatggagctgagacttgaaacgcgttggtgtgactcccgtgtactaacccttgtctgcactagccctgctctaatcacctctcagggctctggaagccattctgtgaggcttactttaggctaggacattggcccagtcagtaggaagcagctgtgggtcccctgagctagagtgctaccctgaggtagttggaattggtacagtgggcaagctcctgcccagttcctaagtgggaaataggaaagggaggtagggatttggagtattgaaactgcagctagtatttcaggtggctggaaatgctggctggttgaaaaatgggccaggggctatctccattcagtaatttccatgccattgcatccccaggtgaaggaatatgtctccaaaaaggccctaccagaagaagcccctgctcggaagctgctggacagaggtggagaggggctgctgagctcccagcaccagtggcagtttaacctgctgacccatgtggaatctcttcaggatgaagttacgcacaggatggactccattgagaaggagttggatggtagggctccttcattggccccctgtgcattggcatgcagtcgagcacccccagacgagctgctttctgaaccccccagtctgagtttacagggaccgctgtactctttgcttctcttcttttcagcctctccccacctccattctcccctcaggatggatgagccttacttttagtatttatcaggtgcaagatctgcatgatgttgggtcctgcctcacttgtctgatcccttctgtaaagttgagtatgcagagagagggcaactggcagtcctgcttgcaggaaatatgtgatctaagccaatctttacaaacaagttctgtgagaaattaaaattttgacttgagttttaggatatctgaggatttaatctgaaaaacctcttattccaatctttgataaaatctaaaatgaagctttctcctcgtaagccagtagagatttgagaatttgcctgagtcatttgtatagccctgagtattccttccagatattggtggttacggacaggcctggaggatcaaaccggtgatgatgaacatgatcaagttcagtctctctccaggaagttgacggttttggttgttgaaatattccctaattatttgttttcatgttgaaaatggagcccagttaaaaaagaaatgttgtttgaggattctgggtacagtctggctatgattttttactgtaactgggaatataaaacatacatgaaataactcaggagaaaatgccatctgttatacaagtgatgccatgaggtgtggccgggacacatgtggctgatgtcaatgcagaggaggagagtgctaataggagggcttcctaaaactcctgagactgaagttgagctttaaggagagtgatggtgtttcctactggagaggactcagggtggatgatctggctagactggaaaaagagttgccctgttggaggacagtgagagagacagcaagacctaggctgggtgtggtggctcacacctataatcccagtactttgggaggtcaaggtgggaggattgcttgaggccagcctgggcatcacagtctctacaaaaaaataaaaaactagccaagtgtaggggtgtagtcccagctacttgggaggctgaggcgggaggactgcttgagcccaggagttggaggctgcagtgagctgtgattatgtcacggtactccagcctgtgtaacacagaccctgtctctaaaaaaataaactaaaaaaaagggattgtaactgatgccactgtctgtgaaaaacatattattagagagctgaaggaggatataatgttagacaaaaaagtgtagctcttgagagaatggcagtaggagtggctctgtagtccctgaaaagaggattagcaccatggaaacagggtgaatgttcggttgttgccacagggaccttccctgagggagaagttaaagtctactcacatcttacttccttaatcctctcttcagccaggtttggcctctctagccctgccgaatgggcagtgtggcaaggatggtaggcctgaacccccttctttggcctcacagatgacctcttgtgtgtcttgctaattcagagccacatattctgtacatttctaagactctaggccctgagagagataacaagaaagcattaaaataaatgataaagcttaaagattttatttaggtaaacagacttttgcatagtatttaagattaatcaaaatccctttttatggaatcaactctttatttaaacaccaagataaactaagctttctttctttcttttttttttgagatggagtctcgctctgttgcccgggctggagtgcagtggtgccatctcagctcactgcaagctccgcctcccgggttcacgccattctcctgcctcagcctcccgcgtagctgggactacaggtgcccgccaccaggcccggctaattttttatatttttagtagagacagggtttcactgtgttagccaggatggtctcgatctcctgacctcatgatccgcccaccttggcctcccaaagtgctgggattatagacgtgagccaccgtacccagccctaaactaagctttcataaccaagttttaaaataggaatttggatgtaacattccttttttaaaaagccggcctgcttagctgggtgtggtggtgcacacgtataatcctagctacttgggaggctgaagcagcagaatctaggaggcggaggttgcagtgagctgagatcatatcactgcactccagactgggcaacagagtgagactcagtctgaaaataaaaaatttaaaaaaatttaaaagctgacctggcgtggtggctcacacttgtaatcccagtgctttgggaggccaaggagttcaaggttacagtgagctatgatcgtgtcactgtactccagcctgggtgacagagcaagaccccatttctttaaaaaaaaaaaaaaaaaagcctagtaagctattatatgaaatatatatatatatatgccattgttttacaattggccattatttaattatttatgtagttatatgaatagtactttatttatttatttatttatttatttttgagacggagtctcggtctgttgcccaggctggagtgcagtggcacgatctcggctcaccacaacctccacctcctggcttcaagcaattctcctgcttcagcctcccgagtagctgggattataggtgcacaccgccatgcctggctaatttttgtatttttaatagagacggggtttcactatgttggccaggctggtctcgatctcctgacctcatgatctgcctgcctcgggctcccaaagtgctgggattacaggtgtgagccactgcacccagcctgaacagtactttaaaactaaaagacaaaggatatttaatgaccatgaaaagtaaaaaagtcttttggcattagagagattattttcttaaataaaaaatgttgccttggtgagcagtggtctctatacacatgatcttagtgtatttgaacagaattttttcctctgtaaccttctgtcttgctagcaaccactatgctagttggaagctgttctgcatctttaaaagagacacttgggatggtgcagcacatggtatggagagggtggcctgctggatgctggggtccagaggagatgctgttgacttcccacagtcctggctttgttcttcagcctaacagacctagacagacagcttccatctcaggaactccacacactcctgttaaccaagctcaggcactactgagtggcttagactcttccagtctgagcgttggtgcgctttcacactgtgcatgcctcctgggccaccgtagtatcgggatgtctttggtgagcctggaactagatccaaggtagttagggtgaccttaagaggggcctctcagcaactgtaggatcatcttgcaaaagattgactgactctctttgctgttggagtgacccatccagtcctgactgccttttgtccatttatttatttttattttattttatttttttaagacggagtcttgctctttctcgcccaggctggagtacagtggcatgatctcggcttactgaagcctctgcctcccaggtttaagcgactcttccttcctcagcctcccaagtagcaggcagatgcctgccaccacacctggctgattttgtatttttaatagagatggggtttcaccatgttggccaggcttgtcttgaatttctgacctcaggtgatccacctcccttgacctcccaaggtgttgggattacaggcgtgcacgtccggcctctccatttattcttctgcctgtttgctgaacagtcccctgtctccttctagttttttttaaagacttactggtgttttgaaactggtcactatccagttttcttgctcagcaggccactagttcctctcacatgactgatcttttactaatggttttcaagcttaagtctgaggaggtggtcttatttttcttatttccaagtccttgtacttgctggaattaggaagagagagggttcctccttcttggaacccccaaataccaacaagaaatatgatggaggaggataaactacatagggcccagagcaatgggtagggcgctttgctggaccacacattccttctctcgctgtgtttgttgcaggcttgccacatttcagacacaggtgagtgttagggatatagtggcaagcaaggcagactcagcctttgccctcgtggaacttgatctagtgggagagacatatattaaacaaatcatcccattacctgtaatgacaaaccatagtaaatgctcaaaggagaacatgtgatatcatagcacctgtaacacaaggaccagattcagggtatagggttggggaaggcttccctaaagaatagctcacaagaaacagaggatttagaaaggtggagaggaaggtagggctgcatctgaggacaggagaggattgcgcagtaggttgcaggctgcttgatgaagaggtactgggtgggcctttcttttgctgcactccagggtccagaaggtgctcagtacaggttggtgcatggactagaaaggctacaggcaggctgggatagcacaggggctacctgcagggggtggttcttgtcaaaggtgcagggttcccagatggtctctccccaaatgccagagctttagggggtagcttagggaagaacaaacatctttctgtagagaaatacttgttctcacaagcaagacagctttctagatattgaaccaatgatgataatgttaattaatacctgaaatcttacattaaatatttaaaggggtcctgcatggtggttcatgcctgtaatcctagcactttcaaagtggccaaggcaggtggatcacctgaggtcaggagttcgaggccagcctggccaacatgatgaaaccccatctctactaaaaataacaaaaattagccaggcgtggtggtgtgtgcctgtaataccatctcctcaggaggctgaggcaggagaatcgcctgtacccgggaggcggaggttgcagtgagtcgagatcattgccattgtactccagcccaggcaacaagagcgaaactctgtctcaaaagaaaaaaaaaggccaggcccagtggctcatgcctgtaatcctagcagtttgggaggccgaggtgggtggatcacctgaggtcaggagtttgagaccaaaatacaaaaattcgccgggcgtggtggcacatgcctgtaatcccagctactttggaggctgaggcaggagaatcgcttgaacctaggaggcagagattacagtgagctgagatggcgccactgcactccagcctgggcgacacagtgagactccatctcaaaaaaataaataaataagtaaataaataaagggagaaaataataacagagtattctgtgccactgatgattgcgtatcaatcaggaattaatatgaagcaaatcagagtttatgatatacaaatagaccttttcaagaccctatagattttcatttttcttgacaggatgctaaaacaccaggctctctgattttcaacatgggaaagctttttattttttattttattttattttattttattttatttattttattttattttattttattattttatttattttattttttgagatggagtctcgctttgtcgccaggctggagtgcagtggcacgatctcggctcactgcgacctccgcctcccgggttcaagcaattctcctgcctcagcttcctgagtagctgggactacagacgggcaccaccatgcctggctaatttttgtatttttagtggagatggggtttcaccatgttggccaggatggtcttgatctcttgaccttgtgatctgcccgcctcgacctcccaaagtgctgggattataggcatgtgccaccgcgcccggctgggaaagctttttaaagagtgagtggtaacactcagaaaggtgcttccttccaagacttctagactctggtaacagtagcctctggcaatgtgtggctgtttaaccaaaactgaataaaatttaaaattcagttcctcagttgcattagccatgtttccagcgctcaatagctgcataaggctagtggctactgtattggatgacacagacttggaccattgatcatcgcagaaagttcttttggactgtgctgctctaaagcatttgtgttttgtcctgggagtaccactttgtagagcaggtgttgacacagtgctggctgaaatggcccttcctcccttgccccatggaggctgaaatggcccttcctcccttgccccatgtctgatggaataaggtgctgaaatgcttgctgatgttcttgcaaatcaagtgttgggagttcactaggtctcatctctctcttctgccgacagtgttggagagctggctggactacactggggaactggagccccctgagccgctggccaggcttccgcagctcaagcattgtatcaagcagctgctgatggacctgggcaaggtgcagcagatcgccctctgctgctcaacatgaaactgggcacccaaaactcatgggggcacaatcctggggcacctgcaggaggagcttcgcatatttaaataaataaacctagcatgctgaatgcacgtgacaccgactgacttcagggatctgggccaggagtgtggtggacattggacaaagaggccattttggctgcgggaggacactctgatctcgaagcctgccataaaggtagcaaatagactcttgggattcccctcttctgtgcacatcgttgaatgaagagagtctttttgcacaaacttcacttgaaattgtgccactgatgataaacggaatgagagccaaaaaagtttagttggagacagttgtaaattcaatttggagtttatttaattgacttttctatcacgttggggcacatgccaactccctggtttcttcctggcatggtgtttgggcagcaggcatcattttccttttctagcttcataggaatattgtgagctcaccatgctgtggaggttgggaaagagcagagtcttggctgccctgctttctccttaggactcttcacttttctcaccacatctcttgcatgacttcatggtactggggacaagtttgtatgccttcaccccagagctggctgggttatggcttttgtagcagagcccatacagcctatggaagaactagaatctcactcacagtaataagaatctaggaggaattccaaaccgaagcaggcagggtctggaacccaaaggacagcattttctacccacttcttaatattgacagcttccccgttctatttaatgtccaaaaatgtttcccaaaatttcaaactctttcactgtaaagatttgttacaaagaatgtggtttggggaattaccttattttatattgttgtaaacaaacttcaaattctacatgtgcgacttttctccttcctgaagggtgtttagtagtcagcgttttcagaattgttttgttactatactttaacattttacatttcctgtttgtattattttgtgagagcaaggtgatcatgctgcttaaggtccaggtacaacctatttgtaccttttgagacaatatttgtgttacttttgcaggttacggttccacatgtaattgctatattttgttttgtttttccttactaggcaaagttaaaatgttccatgctttgaggagtgacccatttcactactttgttttcttatcactaaaggcaaaaatcaaagcacagttgtccattaacacttataagttaattatgggtttatgagtctgtaatgttatatgctgcaaacatttactatgtaaacgtgaagtagccaataatatctcaatagtagtaacagtatctttagcgacctttggaatagttaagcacaggtcattgtggacatgaattcaggcctctgtactaaaatctatttcagggaatgttctgtctagtgatttgctcaccatttgatatataatgaattataggacaagtataagctgatctgctatagctgtccatcagagagaatacacgtggctataacatctataacaaaacgacgattcctctacaagaggctgtttctcactgctaacgttggtgtttctggcgtgggaagaaatgcacaggcgtgcatggcatgcacgttcagacagctgcattgtaagagttctgtcatgcagtctgaaaagggaagaaacaggatggctttctgtagccacacctgtgaggcgtgatgattgttgtattattagattactgatttttcttttctgaaaatacatttgagttttaatcacatctgtggaagctgtaacttttaaggtagtcaatttcatgtcttgttcaacgatgtaagcagaaactgaattgccctaattttgccaactggccattattgggattattgtttaaatttttggtaaaggaagtaatctcctttcattcattgtgacttttgttcttagggaagcagagaagactccccaagttcttataacctcattgtgcttccctaatttaaagccatgttgaggggctccattcccaattcctgggtcaaggtgaattaaccctatgttggagcactggaaaccgttatttgcaaacattgctgttaccatttagaaatatgtgcactatcagctgggtgcagtggctcacgtctgtaatcccagcactttgggaggccgaggcaggtggatcacctgaggtcaggagttcgagaccagcctggccaacagggtgaaaccccgtctctactaaaagtacaaaaattagctgggcgtggtggcggacgcctgtaatctcagctacttgggaggctgaagcaggagaggtgctggaacctgggaggcggaggttgaagtgagccgagattgcgctattgcactccagctcgggcgacaactgcaagactccatctcaaaaaaataaaaataaaagaaaagaaagaaatatgtgcactacctaagttttgtctttagaaaaactatccacctataaaaaattaccttgacaaaaatagttccggtttgactaatcattttgtttctttaagtggtaagtgtatgcaaggtggatccttgatgagccaacattgcactgtggatacatatctatgtttacgcgctattagaacagaaggcgctgtatatagaaatgttgctttgaagcaatatttgcaaaacacgcagacttctgtatctgtatttggaaaaaataaaacaggttcttgttgctatgtttcagttacgtattgttgagttacagtcatgcatcatataacgtttctgtcaaccatggaccccatatacagggtggtcccataagattataatggagctgaaaaattcccatcacctagtgatgtcctgatggtcctactgcataggcctaggctaatgcgtggatttgtcttagtgtttaacaaaaatctaaaaagtaaaatatatataaaaaatttaaactagaaaaaaactcatagaataaggatataaagaaaatatatttgtatagttgtaccatgtgtgtaaacacaaagtgttattacagaagtcaaagttaaaatttaaaagcttacaaagtataaaagttggtcaggcaaggtgcctcagatctgtaatcctagcacttagggaggctgaggatggagaccctgtctctaaataaaaggctgggtgccgtcgctcacgcttgtaaccccagcactttgggaggccaaggcggccagatcacctggggtcaggagttcaagaccagcctggcaaacatggcaaaaccccatctctactaagaatacaaaaattagcatggtggcgcatgcctgtagtcccagctacttgggaggctgaggcaggagaattgcttgaacccaggaggaggaggttgcagtgagtcgagatcgtaccactgcactctagcctgggcaacagagtgaaactgtctcaacaaaacaaaaaacaaaaacaaaaagttatggtgaactaaggctaatttattattgtagaaagaaaattaaaaaaaataagtttagtagttcgtgaccagcctgggcaacatggtgaaaccccatctctacaaaaattagccaggcatggtggcatgcacctgtattcctagctacttgggaggctgaggcaggaggatcacctaggcctgggagccagaagttgcagtgaacctagattgtgccactgtactccagcctgggcaacaaagtgagatcctctctcaaacaaaaaaaaattagtctatgtgttcagtgtttatataaattctggagtagcgtacagtaacgtcctacatcttcacattcactcaccacttacccagccagaacaatgtccagtcccgcaaactcttattttttacttttatatatatatatatatatgtgtgtgtgtgtgtatatgtatatatgcatatatatatgtgtatgtgtatatatgcatgtgtgtatatatacatatataaatatatataaatgtttttttttttttttgagatggagcctcaccgtgttgcctaggctggtgtgcaatggcgcgatctcagctcactgcaaccttcgcctcccaggttcaaacaattctcctccctcagcctcctgagtagctaggattacagttgcccgcaaccaagcccagataatttttgtattttgagtagagatggggtttcaccatgatggtcaggctagtctcaaactcctgacttcgtgatccgctcacctcggcctcccaaagtgctgggattacaggtgtgagccaccgcacccggcctattctatatttttacttaaccatttctatgtatagatacacaaatacttaccattgttactgcctatagtattcagtacagtaacatgctgtacaggcttgtagcctacgagcagtaggctctatcacaaagcctaggtgtgtgtaggctataccatctagtttgcataagtgcactctatgaggctcacacaataaaactgcctaagggctcattttcagaacgcatccccattaagagatgcatgactgtataaagttcttcaccattcttttttttttgagacggagtttcgctcttgttgcccaggctggagtgcaatggcgcgatcactgctcgctgcaacctccgcctcctggtttcaagcgattctcctgcctcagcctcccgaatagctgggattacaggcgtgcgccaccaagcccggctaattttgtatttttagtagaaagacagtttcaccatgttggtcaggctggtctcaaactcctgaccttaagtgatccgcccgccttggcttcccaaagtactgagattacagccatgtgccactacacccagataattttctatttttagtagagatgggggtttcactatgttggtcaagctggtctcgaactcctgatctcaagtgatccaccgcctctgcctcccacagtgctgggattacaggcgtgagccactgtgcttgtccttcttcacctattctaatcttctttaaacattaccttttaaagaaggctgttcttaccttctaaacaactatctttttccagggaggcaggtgcaaactctgccaagaaatcccaagaatgcaaaaatacttctcaatttgtctgtctttaatattcaaaagcaaattgcccctcaccaacttccagcccagtctcactcatgctttgtggtgtgaactgcaggctgattttgattgttgagagcagtgcaaggaagacaagtctggccttccttatattaacaaatggcactcactgcaataggacctatctgggaccaatccaagctgtccatggaccctaactagctccttcctggttgggcagaagcctctggaaacagagtaggtttaagatttcagaacaggtcctcattatttgccaaattctttcttccctttgtaaacgattatgctagtttaaacaccaaaagggagccagccggagagacattaaaatgagtagcttcagtaatgtaaataatccattacttcaactagttctgctttattcctaccacaggcctaaaatttggcaaggaagttgagcaagcctggcggcataagccagagctcacaagaactagcctatctctgtgaaggtgtgcagtaaacacttcacattaaaatggcccagtaacttggacattttgggaagcctgtacccaaagggcaggtgcaagttggtgcccatattggtatagaggtagccagttaagtgagcatttaatagagccagctattttgcgtgtaagaaacccaagtgggtccttgggagcccaggtgaaaaacttcccatgtgtggtagagggataacctaggttcagtcaacatctaaagatcccactatagccaacgaaggccttattgttacggactcccaacttcgtttcgccaccagccagaaaggcggtaggaaacaggcttggtaaaataaacccaataagaacgaatgaaagagacacaccagaccacaggcgctgccaaaactcatttttcattaacacggggtggggtcccaggctcaggcccccgggcccgatcatggccccagtccgcacagagcgcccggccctggccgcccgcagctccaccgctcagccagtgatgcgcacatccgtgcggcggcggatccgccgggcccgagccgcctcgggcaggatggcgagcagctgctcttgcaccagcatctccacgatctgctccttggtgcggatgtcaggccgcagccactggcgggacagctcccgcagctgccggaaagcctcccggggacccgccgcatcctggtagcggaactgccggaaacgctggcggaacgtctcgggaccgagtctagagccggcggggcctggtgtggagcgcgcttcagcttcggcctgaggcgctacgctcacgggtgcgggcccgagaggcagctccagggccgcggaggccgcagctcggggcgtagggatggcttcagggaccgcggcgttgggactggaaggctcaggggcaggcggtgaggcctctggcagcgaggagcccacacagttacgctcaggggctgagctcgaaccggctccttccagtttctccggtggcaccgccgcgggactcccagtggccgccaagatcggctccgtagccgccataactccagctccgggcgtcactctttgtccggtagctgtgtgctcagcactgcgtctgcgcgggggtggggtgagcagggagacgtttccggttaaagggcagagctcgcgtcacccttgagggagtcggactcgggaccggccgagagtgtgcggagcttacctgcaccagcgaagcgcctgcggcagccggaagcgaaagtctctggcttctctgcgtccaggtcggcgcgcgagcacccggaagccgcttgcgggctcccggaagcggcgccctctagcgttctcgagtcgcatgaggcggctgctgccctcgcggtgcgggagggcgagctgcgcgtggcctgggctccttccgaatggtggcgcctctgagcgccagttcgaggaggagtcggaggaggagcctgaatgtttggagatagacttcaagtcccggaccttatccgtgcgccgcttcggtttgcaggtgacctttgcgtgcgggcgccccttctgattgaccctgatgagctgtagctctgatggcccctccttcgggaatgattagggtgacggctggccggggctcgttcgagtggcgcccggccggtggtgacccgaacaggagagcgggacggcgaccattctctcgggaggggcccatctggagaaagtcctctcgcttggtcaaactaggagggcgatagcaccggccttactgcgacgatgacaaagtacaacacaccgtctggcgcgaaggagatgctcgagaaccctttgctgttgttatttttcgcgtgtcctccgaaaccaagggaaatgcggctctgtgggttctgttaacgtcagcatttaataagtgaactctaaatgcattgccccttatggtggccgctggcctcctgagttgactcagctcttgcaacgtagctagttgataaccctcgaaatatagcgaattgagatgtgctatattgtaaaatacgggacttagtacgaaaaaactgatgtaaaaattatctcaatactttttaatactgattacatgttggaatataatgttttgcatatattgggtcaaataaaaatgttattaatttcacctgtgtttttactttttaaatgcagcttctaaaaacatttaaattgcatgtgcagtttacattatatttctgttgagcagccttgggttagagtgttggagtgaggctaccttggtggaatcccctttgacgatacccagctcagagttgttaggaggattaaataaattaagccgttggagagaaagggcttttaagaagtttgctcttgtttttattaggtaaactgcttgctatctctgagctactgttttcttatcagtaaaatgtggatgtaatagaacttacctctcagaggtaattgagaattcagtgagatgatgtaggtaaaagcacgtggccctgacagccctcggccaggtggttttctgtttggtagctgactcacaaatagttttgtttttgtttttgtttttgttttgagactgagtcctccgcctaccgggttcaagcgattctcctccctccgcctcccgagtagctgggattacaggcgcccaccaccacacccggctaatattttatatttttggtacagatggagtttcaccgtgttggccagactggtctcgaactcttgacctcaggtgatccactctcctcagcctcccaaagtgctggcattacaggcgtgagccaccgtgccgggccacaaataggttttatatcctcattttacagaaggggaaactgaggccctcaaaggacaggggcctcatatgaaaggttttctatgaccttgcagtccttttgagcccgtgcaggatggaggagcaggtttaacaaccattaacatgccattagccctgatataaaacttacccctaccataggatgtttcctttggatgggtagaagtggaccctcatgaaatcatttccatagcctgaaaaccttgaaagtcgttgcagtgggcctttaatgttttttagttgctgacatgtaaaaattgggagatttcacatgcaaatctggatttctaatttttcttgaaaaaacggaagagctggccacactggacccaaattcctgctggtcaacaatcagctgacactgagtagagacgacttcctttagacaagatactctgtcccatttggtctcaatctcaaccattccctatggttctctgaaatagaatgttgtttgcatttactgttgctctcaggttgttgctttatttagagttgatatttttctctcttttctttttagaggtgagaaagcagggtcttagtgtttgttatgcctactggcttcaaaccttgacttctgtctggcccctcagtagttgggtttgctgcccagagtgaccaacagtgctattccctgtgtggtaacaggtactcagtttctaggcctaagggagcacactaacccttctgtggaggcaagaggtgatagaagtcttcactggggaggagacttcaagctgagactcaagaacaaaatgggtggggctcagggacattccaggtagaaggtactgcctgtacaaaggcacatagtgagtaggagcaaaactgtggaaactgcaggctatatgggaaagtggttgggatctggagaaggggtgagagatgaggttggaacactggtgggggttaaatcataaatgtcctagaattccatgtttaaaatttagttattatcttcttgtgaaagggaatgaacttttgtggcacctggaatcatgagatgttatgttagatctctagtctatttcttccatccctattgaaatcgtgaattattagagataggaggagggacctgagagatctattagaatcattgaatgtcagactggaagggcccttagaaatggaatttaaaaatccagccctttgtgggccggtaagcctgctttaaagtgattcagcagtaaaaaaataatgtggagggaataaatgaaacaagattggctcagtagttggccgggcgcggtggctcatgcctgtaatcccagcactttgggaggcataggcaggcggatcacctgagctcaggagttcaagaccagcctgggcaacatgatgaaaccctgtctctactaaaaatacaaaaaattagctgggctcggtggctcatgcctgtaatctcagcactttagaaggcttgaaagattggcagtatgtacactctactttggtatatgcttgaaaatgtccatgataaaagttaaaacattcagattcccagaatctgaaaaaaaacatataatgcctcttcttcgaaaagggatgcagttatctactttcatgtaatttacatatatccttgaaccctcccagaagtcccagattaagcttaaaatatacatttatatttcattcttttgaattttgcagattgagaaaccaagatgtcagaagatgaaggattggtccaaaataagaaagctagtaagtggtttcatgaggacagaaatcttttgacttttagtccaaactcttatcttattaggcctctttatccctagattgggagttcacttgggaagggatcataactcattcatctcatatcacttagcttccaacacaaggcctgactcctaggtagcttcagtgttgattaaaggaaagaggacaaatgtggattgcagaccatccctgagaaggcagagctctcatatgagtcccagactctttcagagacctcagtgccttttgatggcacttggttgttgagggttgtggaaaagaagcttggatacttattttcttttttatcagagccatcacactggagaatacgtcttttaaaaagcttttcattggccaagcatggtggctcatgcctgtaatcccagcactttgggaggccgaggcaggcggatcacgagttcaggagtttgagaccagcctggccaatatagtgaaatcccatatctactaaaaatacaaaaaattagctgggcatggtggcaggtacctgtaatccgagctacttgggaggctgaggcagaagaatcacttgaacccgggaggcagaggttgcagtgagctgagatcgtgccactgcactccagcctgggtgacagtgtgagacttcatctcaaaaaaataaataagttttttatttggaaataattatagattcatagaaggttgcaaaaatagttcagagaggtttcatgtacccttcagtcagttttccctaatggtaacatcttgcataactatagtacaatatcaaaaccaggaaattgacattggtacaatccacagactttattcacattttcccagttttacatacatgcatttgtgtgtgtgtgtgtgtgtgtaggtctatgcaattttatcgtgtgtggattaatgcaactactaccacaatatctagaactgtctgatcaccacagagatccctcgtgctatctctttataattgcatccattcatcttcccttcccctatccctaaccacaggcaaccactaatctattctccatgtctataactgtgttatttaaaaaatgttacatacctggaatcatatagtgtataatcatttgggcttggctctttccacttggcacaattccctggagattcacccaagtggttgcttgtatcaatagtttgtcctttttattgctgagtagtaatctatggtatagatgtaccatggtatatttaaccatccattgaaggacatttgggttgtctccacctttgagctgttacaaatagaactgctatgagttattttatgacatggctttgggtaatcacttatctttctgagcctggaaatagtaactaccacacaggatggttctgaatagtcgaggaggagaaatatatataagggaactggtgcagggtttggcacagaatatatacttcgtcatttttttaaaaccgatggttatgaagagataatacttccttgaatatgtaagttctagtatgtagtatttttaaaagtcacaggcattgatattattattagtgtattagtctgttctcatgctgctaataaagacatacccaagactgggtaatttataaaggaaagacgtttaatgaactcacagctccacgtggctagggaggcctcacaatcgtggtggaagacaaggaggagcaagtcacatcttacatggatggcagcaggcagacagaatgagaaagtgaaaggggtttccccttataaaaccatcagatctcgtgagacttattcactaccatgagaacagtatgggggaactacccccatgattgaattatcttccactgagtccttcccacaacacgtgggaattatgagagctacaattcaagatgagatttgggtgcggatacagccaaaccatatcattattgaacatctgtgtatgtgtgatactttatttacagatgagaaattaaggtctagagagattaattaacttgcccaggttcagccaatccatggcaagattgggattcaaacccacgtttaacatagacagtaggaaccatggaaggacttaaagcaggggaaggatgtgatcagatttgtgttttaggagactcagtctggatgcactgtaaagaatattgctttattgctgaacacttagattatttctgatttttcattaaaataatgtgataatcatatattgcttaaagcttgttctgattttgaattataagcatctattactatcaaatctatttggtctctgagtttgaaaaggaagcattctgatagcaagagcttggatggtaagggataccagtacttccttaagctgtaatcccaaaagaggactgactgaaatattttgctacatattgccacctttctttctatagacatgtgtttgattcatagaaccttaggacaacccctttacttcacagatgggcaaactaaagttcagaaagtagaagtactagccagggtagaatccagggcccagcaatgaatgagaattttagttgctctacatcctcatcagcacttagtatttcatttgacagagtctgtcatccaagctcagtgtcattagttattcagaaaattcagtgcagtgttgcagtcctagatcactgcagcgtcaaactcctgggttcaaactattctgcctcagctttgtgagtagctgggaccacaggcgcgtaccgccatgccccactaattgtttttttgtttgtttgtttgttttatagagacagggtctcgctatgttgcccaggctggcctcaaactgctgggcccaaacaatcctcctgccttagccacccaaagtgctgggattacaggcgtgagccaccgtgcctgcccctacctctcactttctctgtctctatactgccatactcctcttctcttcccttctcttcccttctcttcccttctcttcccttctcttcccttctcttcccttctcttcccttctcttcccttctcttccattctcttcccttctcttcccttctcttcccttcccttcccttcccttctcttcccttctcttcccctctcttcccttctcttcctttcctctcctctcctctcctctcccctcccctcccctttttctttcatcttgctctgtcgccacccccctcctcccgctttttctttcctctcgctctgtcacccagctggagtgtggtggcatgatcttggctcactgcaacctctgcctcccaggttcaagctattctcttgcctcagcctctcgagtagctgggattacagacgcctgccaccacacccggttaattttttgtatttttagtagagacagattttcaccatgttagccaggcttgtctccaacctctgacctcaggtgacccacctgcctcagcctcccaaagtgctgggatgacaggcgtgagccaccacgcccggcctcttggctctttttaaatcattcattcccaactccttcatttgctttttgcagtcctatcttctgttctcagcaaggctagctttctttttgatgtttctggaatgaccttctcttctgagatggttatttttaaaatcccttctttcctgagctctgccagtgtcgtctcctctggctgtctcagtgtcttttctttgaactattacatctttgctttgatctcttgttttaaaattcattaagccctttgacttctttgttgttcatgattatcatctgtttcatgttagcttttttatttttctttttttggtgattgtctttcatctgccatttgtttttcctgttccctgcctccctctcctgcttttttcagtaatatatttgtataagtcttgtgttatttcttttttactataactcccctttagatgaagtgagttcttctggacaagctgcttgtgggattgtgtgtggagaaaggactagagtagaattccaggctggcaggaattctcttggcttcatagtgaagcttcttctgacagggttttttgtgagtatgtgaattggtttagccctctcctcttccgatcagttggagcttggcagctgtagggctataaaaatggaacatctgtgtgtttccctggtcaccccactcccctacttctccttggtcccagtgggaccagagaggctcccagagccagcctgtccatcaccatcccaatgttctactgaaggtgttgtgagttgtgccctcaaggtgtagcccgcttctttggagaagtacgagttttgccagctctccctaaggcctgcagccatagcgttctctattggcattaaccttctggatcttctcagcacccctcattgccgcacaggctgatgtgatagcttgctactctcagcaccgtcaccctctggccactggagtgcttaacccagaaaggctgggaagttaatgcctccaggagcagctctcaagtggacaattctgaggcatgctccctgcagtctttttttttttttttttttgagacagagtcttgctctgtcgcccaggctggagtgcagtggcacgatctcggctcactgcaagctccatctcctgggttcacgccattctcctgcctcagcctcccgagtagctgggactacaggcgcccaccaccacgcccagctaattttttttgtatttttgatagagatggggtttcaccgtgttatccagggtggtctcaatctcctgaccttgtgatccgcctgtcttggactcccaaagtgctgggattacaggcgtgagccaccgcgcccggccccctgcagtcttactaaggtccccaggacattggagccccactgggccataggggtgacatgttcatgcacctctgtcaaaaaacaaaaatttatagaagatcctgtgattattctccttagctatgttaacataatgaattatgtttatataattaaccatctttgcactcccagaatgatatgttatttttacaggtactgctgaattctatttgcttatattttaagattttaagaacaatatttataaatgagatgaatctgtagctttctttttttgtgcaacctctattaggttttagtgtcagtgttctcagttcattacaataatttggtagttttccttctttttaggctctggaacggttgaagaaacattgaggttgtttggagttgcctgtgaaacctttaggaccagctgcttttttctttttaggtggtggtagtggtgagagacctcttttacagcttctctacttctatgacaattaatctatttaggctgggcgtggtggctcacatctctaatcccagcactttaagaggctgaagtgggaggactgcttgagcccaggagttcaagaccagcctgggcaacgtagtgagaccagatctctacaaattaaaaaattagtcagtcatggtggtgcacacctgtggtcccaactacttggaggctgaggtgagaggatcacctgagtctgggaaggtagaggctgcagtgagctgtgatcatgccactgcactctggcctagggcatagagtgagaccttgtctccaaattaaaaaaaaaaaaaaggaaataaaatcagaaaattagtctacttaaatggtttcggccggtcacggtggcggatcacttgaggtcaggagttcgagaccagcctggccaacatggtgaaaccctgtctttactaaaaatacaaaaattagccaggcacgatggtgggtgcctgtaatcccagctactcaggaggctgacgcaggagaatcgcttgaacccaggaggcagaggttgcagtaagccagggtcgtgccactgcactccagcctgggcaaaagagagactctgtctcaaaaataaataaataaataaataaatagtttctattggggtcactttggtaaattattttttcctaaaagattattcataaaaatctagtatttaagtgttaaaagactcattcaaattcctaaaaataacctctgttgaaacatgtcagtaggctagctatgggcggtgaactgccattttgcaaccactaaatagagaatttttgacctgaaagaggccctatggatccatactgggggttgcaaacaggtaacatgcctggcagatgacttaattgtgtgaggtgaagactttggtgaattacagagccaatacctcaactaaagacaagcaagttaattttgagcaatatttaaaccaaaacactatgcaggtcaaataaaacagtctgcaagttcacttggcacatcacgtgccatagctagtttatggcctctgccagcccagcctccttcctcataaccacacctcctgagcatctcacgttttagctatgtctcatgctccctgaacagaccctgctctttcttcatatatctttttttctttttttttttgagatggagttttgctcttgttgcccaggctggagtgcagtggtgtgatctcggctcaccacaacttccgcctcctgggttcaagcgattctcctgtctcggcctccctaatagctgggattacaggcccgcgccaccatgcccggctaattttgtatttttagtagagatggggtttctccatgttggtcaggttggtctcaaactcccaaccacagagtctatctctgtcacccaggctggaatgcagtggctcaatcttggctcactgcagcctctgcctcctgggttcaagtgattcacctgcctcagcctcccgagtagctgggactacaggcgcctgccaccacgcccggctattttttttttttgtatttttagtagagatggggtttcaccatgttagccaggatggtctcgatctcctgacctcgtgatccacccacctcagcctcccaaagtgctgggattataggcgtgagccactgcacccaaccacctcttcatatatcttttttttttaagagacggagtctcactctgttgccaggctggagtgcagtgccatgatctcgactcactgcaacctctgcctcccaggttcaaacaattctcctgcctcagcctcccaagtagctgggactacaggttcccgctataaagcccagctaatttttgtatttttagtagagacagggtttcatcatgttggccaggatgatctcaatctcttgacctcgtgatctgtccaccttggtctcccaaagtgctgggattacatacgtgagccaccatgcccggcctcatatatctttcatagctttattatagcaagactttctctgaggattttacttccccaccatattgtgaactcctggtaagcagggaccacatcttattcaccttcatatgctttgtaagcatttgttgtatagcttttataatcagcaaaacaataagaatcttctctctccctctctctctttttttttttttttttgagacggagtctcattctgtcacctaggcttgagtggtgcaatcttggctcactgcaacctgcgcctcccaggctcagatgatgctcccgcctcagcctcccgagtagctgggattacaggtgcatgccaccacactgggctagtttttgtatttttagtagatactgggtttcaccatgttggacgagctggccttgagctcctgacctcaggtgatccacccgcatcagcctcccaaagtgttgggattgcaggcatgagccaccgcgcttggccgaatcttctcataaattgtttgtggaattgaatcgaactccattttatacattatgaaaatgaggccccaagtagttaagtgacttacctaagatcacataggaataggaccagtgctctttttggcattctaccctgtaatagttacagttataaaatcaggaactgtaagagaaatgaaactttcttagtttctagaactgacttaaatgtgtgactctgaatccccagcccacctccttgcagataattgaatttaggatgtcttcaggtaaattgagatccaatccagtaattttgagtggatataatttcaggcttattgattcatcttgggcccattcatagctctccaaacttcctgcttcttcttccccaaagctgatctaattcctagagaaattgtacaaccacagctggcaagaggtgaggttggcagtaaacatttttggggtctcatcaggtcgtactggcatcatctgatgccccttgtgagcctggatactttccttgtcactcttggatcctcaggcagttcagaggactgacgggacacccttcctgcctatagccatctcctaccatctctcttgctttctccaggcccagttgtttctttcagaagccccctacacttttgaaggggatcctcttatatttccttccttaagactaggtttgcagtgggggaggcaaaaactccatacctcatctctctgtctctctttctaaaactttctcttctttctctctctgaattctttacatcttttctcatggtatgggggaaaaaccagttttgtcccttctcacctctgtgtgtgattactgtcccaccccaagagtggcctttgtctttcttctcagctgtccagccatctttgctgaactcagtgtccttctgtctacctatcagttggaggagagttaacagatataccccacgggataggaatggcagagcaggtgatgcttgaaatcacagttttctactgaggatcctggtgcaagagcaaattgagatactcaattgtcatctttaatagaaaaaagcactttagagcctatatttttctatatctttagaaggactccagagatttgagttctagtcaccaagttccattcaatatttgacacttgatttgggtgaggtcttctgttttgctgagttttttttttattgtcctgatttaaccagacttatgggacagtactatgcacccacgttccagggcctccaagttctaagtctcagagtggtccctgggctaaggtgctggatgaacctactcccagcctagaagcctcccgctgtaacaaagtacacccatttttctatgagatagagaatgagttatctttttaaatcatctttttcttctttctcttttgtgtttttcttctgttccccacttcctacttagctgattagaaatgcagttataaccttttgctttcccttcaccagacactcctagagcaagtgtatctgtgtgcttacttaaaagctccagagtagaaacctctcccaccagattgccttgagagacaatagtcaatttacaaccaaaagtatgcctgccaggaaactctgccccacctggagagtatctcgagacaaggccactttacaacctagttctgcccaagatggtggcagctcgaccaggcggtagataaggcaccaaagtgagtcatggagactcccacctgctcattccctcctctgcatgccatttatgccaattccccctcccgcttttttttttttttttttttttttttttgagacagagtcttgctctgtcgttcaggctggagtgcagtggcacaatcttggctgactgcaacctctgcctcccgggttcaagtgatcctcccacctcagcctcccgagtagctgggattataggtgcccaccacctcacccggctaatttttttgtatttttagtagggatggggtttcaccacattggccaggctggaccagaccttgcttctgttaattggatgctacaaatggagagcaagtgtacctgacatttagctacactgctttcttaaaaaaaaaaaaaaaaaaaaggccctggccaggagtggtggtttatgcctgtaatcccggcactttgggaggctgaggtgggtggatcacttgaggtcaggagcttgagaccagcctgggcaacgtggtgaaagcctgtctttactaaaaatacaaaaatcagccgggcatggtggcacacgcctgtaatcctagctacttgggcggctgaggcaggagaatcacttgaatttgggaggcagaggttgcagtgagctgagattgggccactgcactccatcctgggaacaaagtgagacagtgtctcaaaaaacaaaaaagccctatctttgcaggacaggtgagcccccaaattgagacttagcttaggagagttcttggctttgcccaaggaaggaattcaagggtgagccagtggtgttagacagcaatcttttattgaatagtgcttctccttgtggggcagggctaactcatgggcaatgaatccggagtcgatacccagtgtatgagatgttggcaactgtatttatgctcatctctaatcccttctcagccttttggctgagatcaagtgtagtatacgcattcctacccactttcaatcacatgcaaattaaggggcaggctaatgcaaattaaggggcaggttaatgcaaattaaggagtgggtttttagagttttctaggaaagaggtagcaacttcctggtcattgccaagacatttgtacactgtcatggcactggtaggagtgtcttatgttaatgagggatggggacagctagggggtcctagatcctgttttggtcagcagggttgtgccattctcctgtctcaccaggactctggcagccatttagctactttgagccccagtctcctatgtatggagttgagtaaaagtttgggtggttgtgaggattagctgagataatgcctgtgagtatcccataaatgttagactcccacattccaatccctgtgtcccctgcctccagaatctttcattgtgaccttaggagattctgagaatgatttttctcagagcagggcttccagtagctgatggtatggtaggaggagtggagtggagctcttgccttgttactgaggaaatctatttgtttctagtattactggatttttggggaaaaatttgtagtcctccccttgaaaggcaaaggggctagttgtgccatttgcctgcacaggaaccatgaggagacatatggtaacttatgcctggcagctcctgaagaaggaactggtgaggaggggcaagggccctgggagggaagagcagaagactgaacagacaggtgttttgaggaaggtcgatgcaggtgtaggaggggtcttggatgaatggtggccatcctgtaccttttggagtcacagcatggcacaaaggagggacccctgccctgtagcctaccagccccccacactgggcaagccataagccacactcagagccactgagtcctgttctgtacccactcttcctgctattatgagatccagagagaacgagggaggatagagtcagggtagcaacattgagtcataggttaagcttgtgaactctggagccagactacctaggtttaaatccctatcacctattagtcatgtgaccccaggcaagttgcttggtttgctgtgcctttattttctcctctgtaaagtgagatgataatactagtacctactgcataaatttactgattaaatgatttacatatcagaatagtgctttggataatgcctgacaatagtaaattgtactcagtaagtattaattttattcataaagtacctttccccatatttccatagatatctaatttttaagaaatagaacattacaggtgtagggaaagctctttaccatcccatgcccctttatttctctttaatagtaaccactttcctgaagttggtgtcacccttcctgtttatatttttatatattatcacatgtgtatgtatccataaacaatatatagtatgtggcacactgtttaaaaatgataccataaatagcatcatagttcttttttcccactcaaaatcatttcagctttatccacattgacacacacagacttagtgctgtgttcaatcctgtgactgaaccataatgtattgatcccttcgatccctactaatgaacatttgttttcagccattcactgttacacacaatgttgccatgattaccctcatggctatccccttgtacatgtatgtttctctgaagaggacatataaagtacatacaattcttccattgtgaagtacacacatcctcaactttatataatgttgccaaattgctcttcaacatggttgtaccatgtttcccagttcccagtgataagtgcaaaatagtatcatgttattactttaatttccatttccattatttctagcaatgttaaaaatggtttcacaatttggctggggcatgaaggctcatgcctgtaatcccagcactttgggaggctgaggtggaaggatcacttgaagccagagttggaaaccagcctgggcaacaaagtgaaaccccctctttacaaacaatgtaaatataaatacaaatgaataaaaacaatattttcacaatttataggtaatttgaactttccctttgaattacctttgctcattttgctattgggttatttgtatttttcttttgatttgtaggattacaaaaaataaattttggatcgtaatcctttgttgattatatgcatagtaagtatatttttccagtctgtagttcgttgtctcactttgtttatgatacactttaaaaagaacattctcttttttcctttgtttgtttttatttatttttttgagacagagtctcactctgttgcccaggctggagtgcagtggcgcaatttcagctcactgcaacctccacctcccaggttcaagtgctcctggtgcctcagcctcctgagtagctgggattacaggcgcccaccaccacgcccggctaatttttgttttttttagtgcagatgggatttcaccatgttggccagactagtctcaaactcctggtctcaagtgatcagcccaccttggcctcccaaagtgctaggattgcaggcatgagccattgtgccagagctgtttgtttgtttgtttgtttcattttgttgttgttgttacagggtcttgctctgttacccaggttggagtgcagtggcacgatcatagctcattgcaaccttgaactcctgggctcaagcaatccttctgcctcggcctcccgagtagctgggactacaggcgagtgccactgtgcctagctaacgatgtacttttcaatagaagttagtaaacagagacttttatttagtttttgcatttttttctttttctttttttttttttttgagacggagtctcgctctgtcgcccaggctggagtgcagtggcgggatctcggctcactgcaagctccgcctcccgggttcacgccattctcctgcctcagcctcccaagtagctgggactacaggcgcccgccactacgcccggctaattttttgtatttttagtagagacggggtttcaccgtgttagccgggatggtctcgatctcctgacctcgtgatccgcccgcctcggcctcccaaagtgctgggtttacaggcatgagccaccgggcccagcctggctttatgtatttgtatatgtgtttgctgaattgtttgaaagtaagctgcatactttatgacatatctttcttaaaaataatgacattacccacataaccaaataccactatcatactaagaaaatcggcactgatttcctaatattatctaatgtacagtcatattcaatttccttatttgtccctagagtgcctttgctctgtcacccaggctgtagtgcagaggcgcgatctcagctcactgcaacctctgcctcccaggttcaagtgattctcctgcctcagcctcccgagtagctgggactacaggcaagcaccaccatgccaggctaatttttgtatttttaggagagaaggagtttcactgtgttggtcaggctggtctcaaactcctgacctcaggtgattcacccgccttggcctcccaaagtgctgggattacaggcgtgagccaccgcacctggcctagggtgccttttatagcttgttatcatgaaccaggatccaatcaagaagcataccattggtatgtctcttgaatctttattaatctagagcagcccccatgccttgtttttttcatcatgaaattgactttttgaagaaactaggttcattgatttatagattcttctacatcctggatttttccctatcttctgtattcacttgttctcagtctaattccaaattcctggggaaaaggtagggtggcccatcttggattaggtgttatataagttttctatggctgccataacaaattaccacaatttgatggcttaaaacaaagcaaatttattatattacagtactgtaggcaagaagtctgacatggatgttcttgttctaaaatcaaggtgtgagcattcctttctcaaggctcacggccttttctgcttctaaaggccacccacattccttggcttgtgggcccttccttcatcttgacagccagcagtgttgcattcctcttaccattattccctcagatctatctgattctaaaatccaggctctgtacatcatacctatactgcctgcaattagtcgtgccacttattttgtggatggaattgaaggatttgacatttagctggtttgctggtgcataacaactagcttctggggagagatgtcctgactagtagctgccaatttctatggcataagtactcctaccatggccagttttaagttaccaacttaatttcagcaggcttgcaaaattcctgaaaatgtaaccatcactccagcacactacagcacactactgcatttaatcctggtaaatttcaccttgttcagcaccatccagcctgctgttgactgttgagaacagatggtttctattgatcttgtttgctttgtttccatagggactgtaccagctcgccatggatatcatcataatgatccgagtgtgtaaaatgttccgccaaggcctcaggggattccgggaatatcaaatcattgagactgctcactggaagcaccctatcttctccttctgggatgtaagcagttgggctcagcaggattatgagggctcaaagaagcccaataaattgcatcccacttcctggcctaagctcagaactgagaaagaagacaaaaggaaaagcagatgagagacccaatggtcacttttattaatggccatacttctgttggagagggtgacttacatcatcaaccaagaggtttacctaatactgaaccccagatttagacagccttacatgcctagccacaggcaacgctggaccaaggcaggctccactgcaacagcaggcctgctgccaaaactcatggcagggaaaggtggagcaaaatatgggctgagagggaaggagacaatcatgcctagtttttctctttccaaattcatcaaagagtttaagtcactcctcaatgtaaaaggagagaggccagtagtgttctactaatacacctccctccatgtggaaagaaaccttgggagtagagaggtggtctccatttcaatggtgatcaaaagagccagaagcaatccaggaatcacaataaccagggttttctaaatgcccacacgctctctctattcgcgtctctactttctttcctacacccctacttcggtgcaggggcattttcagggctttgttcactgcggtgaccatgtttcttttatttttttgagacggagtcttgctctgttgcccaggctggagtgcagtggcgcgtcttggctcactgcaagctccacctcccgggttcacaccattctcctgcctcagcctccctagtagctgggactacaggcacccgccaccacacccagctaattttttgtatttttagtagagacggggtttcaccttgttagccaggatggtcttgatctcttgacctcgtgatccacctgcctcggcctcccaaagtgctgggattacaggcgtgagccaccgtgcctggcctggtgaccaggtttctagatttcctagaaggtcccaatttaaaatattttatcccagtggtagatcatgtgcccttctttagctcagaaaagttggtcacccttctgctaacttgttctagttccccagaggtatcttcattgctactgggtgtgttgctcagggcttcaaagtttccccagcaatcacctggacaaatcctgcccatttttctgttgtttcaggaatgactagagccagtccccactcctctgcatctagtgattcactccaagaaatttccctaaagggcttctgacagatagtggccaaagaaagggggatacggggctggtgatgggggaaggaaaggcagccttaaactggtttctgaggggccagcaggtaatataactagtgtgtatgtagctgagtttaagatacagcaggccagctggagaggaaagatacacctcatctaaagacattcagatacaaatattatattttaagaccctgtgctggccaaaccaaacaaggctgcagccctgtggttgggctgagatgaaaaacgaatggagtagaagaactgtaaccaaaagactcaggttagctctcaggaaggacctcctgactctcagggtggcatgtaatggtgatgcaatgggccctggagatcagagggctttggttaccagaagacgtggcctgatgcatggggcagttggaagctaagatgcagagtcacttgttgtcaggggaatgtgaggctaagcctaaccacattggccagccagagtggcttgagcagagcagaagcctctcaagggcagcctataagggtcatagggttgtcaggcggagcactgggcggctggagtgcaggatcaggtggggagccctagactgcttcagtagatgtgtgaatctggatgtttctgagcactgcctctttccttcagtagtctccctgagaagcaccacatggctatgcaaaggataaacacgttgtgggggcgagacgggtctgagtctaaggaacaaatgacatgtggcttgaggccacactccagacacggaattgggtttgctgaaagccttgagttggggtctcagctagaccactgacttgctgtgtgatccttgggcaagttccttcaccatctcagtcctacatggagcttaataaaacctgctttgtcctgatgactaaatggagtaaggcagggaggatacactgtgcttggctcattaaagacatttaacaaaggttggcttcatttgttcctttcttttttttattttttttatttttttttattttttttttttgagacggagtctcgctctgtcgcccaggctggagtgcagtggcgcgatctcggctcactgcaagctccgcctcccgggttcacgccattctcctgcctcagcctcccgagtagctgggactacaggcgcccgctaccacgcccggctaattttttgtatttttagtagagacggggtttcaccttgttagccaggatggtctcgatctcctgacctcgtgatccgcccgcctcggcctcccaaagtgctgggattacaggcgtgagccaccgcgcccggcctctttttttttattttttgagatggagtcttgctctgttgcccaggctggagtgcagtggcgcgatctcggctcactgcaagctccgcctcccgggttcacgccattctcctgcctcagcctcccgagtagctgggactacaggcgcccgctaccacgcccggctaattttttgtatttttagtagagacggggtttcaccttgttagccaggatggtctcgatctcctgacctcgtgatccgcccaccttggcctcccaaagtgctgggattacaggcgtgagccaccgcgcccagcctgttcctttctttttattcttccttttcttcctcctctatgcttgtttgtttgctgcttttcccccttccttttctctctcctttcctgtttcctccttatcctcctttccttctccccacccccatatttctctgccttcacaataatatgctgtaaatgctggacccaagcctagtgctgagttggggccttcgagcagaggcaggcctgaaagggccggctgctatgaggtttcccatggcttcctgcccaccatggtggtccaggtagacaggagggctctagatgcaaagttctaggggcagtcttgctgattctccctcttctccctgccctctttctttcagaaaaagatgcaaagccgagtcacatttgataccatggacttcattgcagaggaggtatgcatagctcgaaacttgctgtgggggaattttctttctgcaccctggcttggaagaaaccctggctgggtatcagcagagctggtttcagtctaggctctgccaccaactcagcttgtcaccctgggttggccacttcgtttcctcatcaataaaatagctgatctcagtgattccttccagccctggagctccaagactgtgagcatgtaggaaccagctgtcactgcacagttgagcagaaccaatgggagagagttcctgggcttggacccgtgggaaaacagcaggaaaagataaagcagaggatgtgagagtcccagagagaggaagaattcaggtggtgggaaagggctgacctgtgtgaattctggttctaccctgaattctctgagagatgctgggcacacctctcacacctgggtgtcagatacccttaaagagtcttattcaggtgcagcgcagctgttgacactcggaaggctgaggtgggaggatcacttgaggccaggagttcaagactgcagtgagctatggtcgtatcactgcattccagtctgggtgatagagcgaggccccctctctaaaaaagagtcctctcattttgatgagagaatgcttttatatccatgggagctttggactgtgtgacttgttccctgaatttcaatctcatcattgttatcttcttggcttctctccatgatatcctggatattaaatattaaaatccaatttaaaatttaaaagagtctacctatttatagggaacatctgaaattctcaccaatgcagacctgacttgatcctggcttggagtagccacgttgttgtttttttcctcagtggaaggggaaagaaaagaactttataatgggtatcagggccacctgtgcccatctcctgccccacccctttctcttcttggagcccaggtatggcttctgttgcttgcctctcctgggcacagccttatttttcgtgccccctcgtgtatgaagcatactcagttaagtcattcaagctctgtgactcttcagctcttcaggctggctagtgtgtgacactgagcactgaagcttaatcaggctctttccttcaggcaggagaaactaggggcctatctgagagccacagaactctagatatgagggcaattctgtgcaccgcagtagagggcgggaagagggcacaaagggaaaattctttgttatgggcaaggcctataggtggtcctcaaatgaatcatgcctgactctggttccaacacagggaagagtagagagccaatttatcctcccgtctcagccttctgagtagctggcattacaggtgtgcgctgctgagcccagctggaggctcattttaaaaaccagccctttggccagatgtgctagctcacgcttgtaatctcagcactttgggaggccgaggcaggaagattacctgagctcaggagttttagaccagtctgagcaacatgtgagaccctgtctctactaaaaattaaaaaataaaaataattagctaggcacggtggctcacacctgtgatcccagaattttgggaggctgaggtgcgaggattgctggagcctgggaaatcgaggtcgcagtgagctatgactgtgccactgcactgcagtctgggtgacagagtgagaccctgtccccctgcccccaacccatcccaaaaaagcaagcccagccctctgagtgatgctaatgagtatagggtttctttggggtgatgaaaagcttccaaaacagtgtggtgattgttgtacaactctgtgaatacactaaaaaacactgaattgtacactttaaatggtgatttccagggcatgtgaattatatctaagtaaaaatgacatataatatatagtacacacacatgtatagttatataacctgcccctcagcacagcatttggattctgatggacaactaagcctcagtatagtccatattgggcttctaataacgctaaacttctcacagacaacccttagtattagagaggcttagaatcatagactcaattattgcagcaactgtcagacagtggaaacaatggatacatttacaaaacattgtttagaaaaacactgagtgaagaaaagcaaattgtgcaagtgatgtctacagtcttgacatttatgtaaattttttatttttagtttttgagacagagtcttgctgtgtcatccaggctgaagtgcagtgatgcaatcacagctcactgcaacctcaacctccttgggctcaagcggtcctcccattttagtgccccccagtagctaggactgcaagtgtgtgccactacgcctggctaattttttttttttttttttgagacggagtcgagctctgtctcccaggctggtgtgtagtggagcgatctgggctcactacaagctctgcctcccgggttcacgccattctcttgcctcagcctcctgagtagctggaactaaaggcgcctgccaccacgccctgctaattttttgtatttttagtagagacggggtttcaccgtgttagccagggtagtcttgatctcctgacctcgtgatccgtccgccttggcctcccaaagtgctgggattataggcaagagccaccgtgcccggcccaatgcccagctaattcttaaattttttgtagagatgagggtcttgccatattgcccaggctggtttcgaactcctgggctcaagtgatcctcctgccttggcctcccaaagcactgggattacaggcatgagccactatgcccagcagtaaattttaaaatacaaaatagtcttatatattctgtgggtacatatatatgcatacataaaagtggtaaactcagatggtggggagcagatctggattggggtggtgtatacatataagaggattttaactatctgtgttgttctgatttctaatggaaaatatgtgttatttctaaaaattttacttacacctaagaaaaatagaggaagttattatgccagatgttaatggctaattttgggtagtgggattatggtcagtcattctttcttgatccttcatgtcctctggaggaacacagtaggggtgtggctggcctgcagtgagtgaagggaaaatggtgagaaatggtgtttgagaagcagacgggccaagtctcctatgccctatttgaagtgtattcccttttccccatcccagacattttttgagctcctaaggtaggcctagatctgtgtgtggttgtgaggaatattaggctgtgtaacatccccagcctgccattgaggagctaactaggagttatgatgagacttaactagtaagttacccactttcatgataattacattaatccattcactaaggcagagcccttgtaacctaattacctcttaaaggtctcagttttacaaatttttttgtagaaacaaggtcttgctatgttgcctaggctggtctcaaactcctggcctcaagtgatccccctgccttggcctcccaaagtgttgggattataggcatgagccactgtgcccagcgtccacttcttaatagtgtcagaatggcaattatattttgacacaagttttggaggggacgttcaccctatagcaagagcctactggggaaggggctactctttcagctaagacgacccagtggggactcactgagggtgtggcagcatctgagctgagaccagaatgatgagtcagccatgtccacgagaaaacccaggggacaaatattccaggcagaaaaaaacagcccaggcagagacctcaagacagagccgagcttagcacatgccagggacaggtagaaagttccagagtagagaacaaaggggagaggtaggagatgaggctggagagaagccattgagggtgttcacaactcacagtgtcacttcttcagcaggtgggagtggtaggtgaacgtgctggtccatgaggcctggttcactggagaagaaaagctttagctaatagtctctggaaggttcactttgcttgttagtctcctgtagcacactgagctctaggctgagacagaggcaaaggtctcccctgactgctatgtgtatgtgctgagcagactctgcaggaccactggagcccagggaagcctgtattgcctgggaaggtcaatgaacaacacaggtcggggggatgtcagcgttgatatgtgtcagatctcctaatcctgcctgagtttcttcatctgtcaaatggaataacagttcttgggctggcaggatgcagtgagatgggcgtgtaaaatgtttatcccagtgcctgacacacagtaagcactcatcacgtcagccactgtggtacagggaacgggagagtgtacaagcaggactgtggggtgttgcccgctggcccatgggtgaaattgctgggtcccctgtatcactctggtcctctctccccagggtcactttcctccaaaggccattcagatcatgcagaagaagccttcctggagaacagaggatgagatccaggccgtctgtaacatcttgcaggttctggatagctatcggaactacgcagagcccctgcagctgctcctggccaaagtcatgcgctttgaacggtcagtgaggggcacagcccttggccaccaggctgaggctggactgagcaaaagagcctggctgagaaggtgtggcaggtcctgcccacccctctgcataatgtcagccatgaatgaagtcttctgtccattcacttcagctcccactgctatggtcgcagcaccctttatctcgctcacttattgagactcttaattaaagggccattaaatctggagaggatctagtagaaacctcagagaggatctggtccaattccctcatttttcagatgaggaaactgaggctctgtgggggaaaatggctcctcctaggtcacccagacaaaaagaaacagcgctgaagctcttttcagttacgcccatcagagcttgggatgaattctttctgaaacagcttggctttgcttgaattaccactgaggtcagtgatgctctgattgagagttgagaaagggtagtttcccaaaggagaatcagggtgtgattggtggaaaaatatgaccagatgcttgacagcaaaagcgacagatgtctgcttttggagattcgggttctagctctgacttgattgtggcttgccgtgactttcagcaagctgtgggttccttgggtccccctttccccttcccaaaaatgttggttgagcttgatggtctctgagggtctttctggctctagctctagtcatctttacttcagtgaacagtgcctgtgctccctcatcttcaaaatctcatttcctagctgaatattcctgctatctcccagctagtcattatcacctgggccatctcctctttctttattctttttattattattattttttgagatgggtctcgtcctgtcaaccaggctggagtgcagtggtgtgatcacagctcactgaagcctctacctcctaggttcatatgagccttccacctcggcctcctttgtagctgggacaaggggtaggcatcaccattcctggctaattttactttttattttttgtagagacatagtctcactatgttgctcagggtggtcttgaactcctgagctcaagtgattcttccacctcagcctcccaaaatgctgggattacagacgtgtaccaccgtgcctggcttgcctctttcctacattgataaagattccaggctgatactggtttgtagctcatgaagcccacagccacaatggaggctgggcagtactgactccagcctggtgtggtcctctgtctgtcctctgatcccttccctcaggagtttgccacagaatcacaaggccagtgagtactctctaagaggtcagaagaggagatgctgctgggggctgggtcagggaaggcttcctggaggaagtaggatctgagttcctgaaaggatctgaatagtggagaagacagggaaggccattgcaggcaggggagcaacatggacaaactgatggaacaaagtgggtatcatctgccctgagcagggtgttggttcccctgctgctggtcaagccagcgagtcaggaaggagcagaaggtggcagtgtggagggggaggaggaagaggaggaactgctgagggcagggccatgagctcagagctggggacaatggccctgctatcggggcacttccacaatggctgctcatcagtcctggcagagactaaagggcagacttttttttacccattgtctcctgggtaaaatccaaacttagctgagctttggaggccctttatggtgggaccagtcgaatttctctcccaccactcccctgacttgccttctcccattttcctttcccgtgaagtgcacattacctatgaagtacacgttatcccttgaatgtgccgtgctttgggccacctctgcacctttggtcatggtggtccctgtgcctgggaccctcttccatctctttgtccacctggatgactcacttcaagcaccatgctagagccttgtctgaccttcctaagcttggataaaggccccttctctgtgctcctcaagtagcctgcactgacatctcttaaagcatttttaaaccttatttacatcctgtatgtgaccataattttgaaaacaaagtctgtgttgttcattgtgcccaatttttttttttttgagacagagtcacccaggccagagtgcagtggtatgatcatggctcaccatagccctaaactcccaggctcaggtgatcttcccacctcagccttacaggcagctgggactacaggtgtgcacccccacatttggctaatctttgcattttttgtagagatgaggtttcaccttgttgcccacccaggagttcaagaccagcctgggcaacataacaagactccgactctccaaataatagaacaattagctggatgtggcaacttcaggtctcagctcaaatatcccttccttattgatagtaatagtaagaatagctaacatgggactgggcacagtggcttactcctgtaatcccagcactttgcaaggccaaggtgggaggatccttgagcccaggagttcaagaccagcctaggcaacatagtgagaccctgtccctatctcaaactcctaggctcaaatgatcctcccaccttggcctcccaaagtgctgggattaacaggcgtgtgccaccacacctggcctcacggtacctaacagacaccactgatatttatttaacttattgaatgaatgaaggaaaagaataaatatcgaaagaattgagatttggacttgcatacgaaatacagaaacttccctctgagtttaagaactccttgttcgctctgggcctgggcacctctaccccaagggtgcccagttgggtagtgggctgctggtaattatgataagaccattatctgtgtctcattctaggcatactcatctgcattttacagacaagagaaaccaaggatcagagaggggatatccattgctcagtgtcacacagctaagagcagaaccaggatttggatcctgggctaacgctaaagccagtcctcctaatcatttagtgactctactaacccattcattgctttcagcatgtgttcactcatttattccactatgttcaatgaacattcactgtgcccaagcacacgcagcagtgacccagactggcaaagactctgctctcaggaagcttcagttcaaccgaggcaggcaacgggataggtgttagtgaaaggctccagcttgactggcagggctgggctgtcctgagggcccttctggtccaagtctgtgctcttatatcccaaagcaaagagcacaaccagtccagagctcctctcagcttggacctgcccccatgtcactacccaatcaactagcagtggtcttttcccaggtttggtcgcaggcgtgtgatcatcaagaaggggcagaagggcaacagcttttatttcatctacctgggcacagttgcaataaccaaggacgaggatggcagcagtgccttcctagatccccacccgaaattgctgcacaagggtagctgttttggggtaagcccaggggaaggacccagtttcctggggtggagtgggtggaggtgacaggacttctgctagaacctctcagccaggcccagtcctgcctagtactctgtacaagtcagtgtcccgtgtgggccccttacctgtcaaatgctaattgagttggactaagatcagcctcttcatctgtgatgtttaagaagtatgttcctgatacagccctttagagatgaagtgactccatagtgaggcctctccagcttcctcccctctggcctgttcaggtctgttgcctctttttccataagcagcagattaagaagaaggggagtgggccccagtgggagaatgtgcaggagaatagaggaggctagggaacacacagtctggtgaggagagaattcagggggaagatggaggcacggaagatgtgtgtaaggctgaggacaggaagtggaggtggcctcacacttgcccttgccctgtccacccaacaggaaatggacgttctgcatgcttcagtgaggaggtccaccatcgtctgtatggaagaaacggagttcctggttgttgaccgggaggacttctttgctaataagctggaccaggaagttcagaaggatgctcagtatcggtttgaattttttaggtaactctgccttcattcaacatttttttccccttgtgtgtttattagctgcctgactttgtctgtcctaggcctggtgggaaacatactggttgctgttctctctgtctgggatgctctgaagtcccacctcgtacccaccttctctctctgcagactcctactatcccttcgggtctcagctcaaatatcccttctttattgaaagtaatagtaagaatagctaacacgggactgggcacagtggctcactcctgtaatcccagcactttaggaggccaaggtgggaggatccctgaacccaggagttcaagaccagcctggacaacatagtgaaatcctgtccctacaaaataaaaaattaaaaaaaattagctgggtgtggtggcacatacctatagtttcagctacttgggaggctgaggtgggaggatcacttgggcccaggagttcgaggctgtggtgagttgtgatcgcatcactgcactccagcctgggcaacagagtgtggtcctagtagctaggactgtaggtgtgctgccacatccagctaattgttctattatttgtagagatggaatcttgttatgttgcccaggctggtcttgaactcctggtctcaagtgatcctgccactttggcctcctaaagtgctgggattacagacatgagcccccatgctcagcccaaactataaaactataattccttttttttttttttttgagagagggtcttgctctgttgcccaggctggagtgcagtggcatgatctcatctcactgcaacctccgcctcctgggttcaagcaattctcctgcctcagcctcccacatagctggaattacagtcatacaccatcactcccagctaacttttttgtatttttagtagagatggggtttcactatgttggccagggtggtgttgaactcctggcctcaagtgatctgactaccttggcctcccaaagtgctgggattacaggcgtaagccactgcgcctggcccaaactataattcttgattgcatggtaatttctttacagtttatataccccctcagacagtaagcagtatggtgacagagaccagatagatctgtctttgtcactactataatccttatgttgtcacactgccagacacatgcaggtgctcaacaaataaatattgagtaaggtgaataacaggatataaataattacaatcacatgtgagtcagaaagtaagcaccgtaactgggtatcatatttaaaagcagaactcatacatagcaaaagatttttggtttttgaatacttatgtgcatgaaaggccacgtaaggatatgcaagtgaaatctcatttaattgctcttcagttatttgcctttatgtaaaaggaataaaaatccaatgaagtatctgcactggccctgaaaatttgggctgtagggctgcacagctacagagaagtgtgatggccgaggggtctggttcctgtggctggggctgagagaggtagcttcatcccctggaaaagtggggatttagtcctaaagggaggagctgttttttttttccatactgtggaaaaataggtctggctccaatctcagctcttaggttaccagcgatgtgaccctagataggtcacgccatttctctgtgttttagcctcctgctctgtaaaatggggataaggatacccttctcccaaggtcatggtgaggatggaatggaatgatcatgggaagtgtatggcccagtgcttggtgcgtggtaggtacttcttctatggtggccctacttttcttctggtgtcttcagaccttcgtccctgacatggcactgagcgtgttcacctctggtgccctgaccttaactcagtgcgcgcattgaggcctgagtcaccttgagttaacctgattcaatgaactcagtccacctgagtcagttaagttctgagcccttaacctgttggaggtgagaaaatctgagatgattgttggcagcacttggagcagcatatgaaggcaggcaagcctgtgaacgtggtgttcaaggtcaggggaaggggcagtcacagtggggtgggttcacccacagggagcaacaggcagaaagagtggagtccagacatgtcccactctccagacccagagctgaggatttgaagccaacaggccagggggacacaagggttggatgagctgcccaaagcaaaggtagggccagaaccgctaagttgggggacagagcagctgtgagctggagtggggactagcttcatgagccacggtggggagggatggcagggctggaggaggagaagattcttggaaggaggagcagaggtgagaaaagcacagaggctggatcacccaggggcatctgagcagcagtaaagaggggagcttggctggaggggagggccttgggaaaaggaggagggagccaaggtgatagcaggtaggagaatggctacaggcaaggccaggtaattgggcaggtagcagcgaaatcttccacccaggcatcctccacaggagaagagtatgtgccctctgcagattgctaaggtctgggcaccttgtgtgatggagttgatgaattctaacaggctcttcccacaggaagatggagctgtttgcatcatggtctgatgagaagctctggcagctggtagccatggcgaagatagagaggttctcgtatgggcagctgatctcaaaagattttggagagtcacccttcatcatgtttatcagcaaggtgaaaagtctgggggttgggatgagggtgaacctctgaggagcatgcctaagatcatgtcctgtgacctgatggtcagagtttgagcccttttctgcaacctgtgcaattcacttccttctcagagtttccatgtcccagctgtaagaggcctgcctctcacagagcatggctagagacattagatatatggctattgtgttagaaagaggaccaagggattctcccgccttgagctcctaagcatgcttatttacatatagatgcatatttaaattatgcatttggctgttgaatcttagtgatgccagatcacttttaaatttatttatttatttatttatttattttgagacaagagtctcgctgttgtcagcccaggctggagtgcaatggcacaatcttggctcactgcaacctctgcctcctgggtttcagcaattcttctgcctcaccctcctgagtagctgagattacaggtgcctgccaccatgcccggctaatttttgtacttttagtagagacggggtttcaccatgttggacaggctggtgtcgatctcctgacctcaggtgatctgcctgcctcggcctcccaaagtgctgggattacaggcatgagccaccaggcccagcctatttatttttgagacagagtcttgctcactctgtgccccaaactggagtgcagtgacgagatcttggctcactgcaacctctgcctcctgggttcaagtgattctcctgcctcagcctccagagtagctaggactataggtatgtgccaccatgcctggctaatttttttttgtatttttagtagagatggggtttcgtcatactggccaggctggtttcaaactcatggcctcaagtgatctgcctgcctcagcctcccaaagtgctgggattacagatgttagccaccacacccaaccttaaattatctttaaattgtaaaagtgatatgaccacattaggaaactttctggaaaaagggaagaaatcatccataaacccatcatctcagagtagagtttcaaaatggaatttcttggtatcatgattttgttttgtaaggcagactttattcaaaggggccatagccataggtatagggaccactgcaatggagtcttgcagccagagacagagattggactcaactctcagtatcgtaatttttatggctcctgcaacaaattgcattccaaaaggagagccccaccttatctagtgtccaggatgtacatttttgttggtgccatcacagctctgccagccttgcatgtcattttttcaaaagttttctagtttaataggtcgcaattgctgccatactgaggatttgatattttttctgattactagtgagatttatcatgtttgtttatgacctacattttatcttttgcaaattgcttcacgtcctttgccaccttctctgttggttgataatgaaaagaaaatctcccatttctcaagtgcttactgtatgccaggttctatgtttcacatgcttcatctcattttagtctctatagcccggaggaggttagtattgtcattattcccattttacagaggaggaaactgaggcacagtaaggtgaagtggttatccaaggtcacacagctgatgaagtgcagaggcagggttcaacccaagtctctctgactgcaaagatattttcaagaacttggatttaggatttgggctgacctttctgtctggttcttacagattaagccaccacaggcatttgttgagtttttgccaaggtcatgacacattggtccaggctctggagggatacaaagatgaaaaagactggttttctctctttatagatctcctccaccagattccacacatagacaaagaaaagtgtcaatgccaagtaccaagtgattggtgcaaactctgcaagttacaagatttcaggagagggaactctctaaaggctggaggctttaagaagggcttcctggaggaggtgaggtgggagatgagccctgacatattgaaccattaggcaaaaggaggaagcaagattggttgtgtgctggcactggcttgtacctgcctatgagagctgattgttaaattttcaggaattttggtaaacatagtaattattacaaattagatgctataaacctacaattaaataagttatatggaaaattaggagctgggcatggtggctgatgcccatagtcttaacgactcaggagactcatgcaggaagatcatttgagcccaggagtttgaaagcagcctgggcaacatagcaagaccctatctctaagaaagaaagacagatgagagagggagagagagagagagagagagagaagaggggaggggaggggagggggaagaaaggaaggaaagaagaaaggaaggaaggagcaagcaagagagagaaggaaagaaagaaaacaagggtaatacatactgaaaactcatcatttcctactgatgttactgcatttttactagtttttctcttcaggttacgtctattgtgtctctatggtagaaatactatgcaattgtgagcatctcttccccactccacattcagtgacctcatgttggtagcttacaattagccatggttggataatttatacaatggaatcagcaaacaccctaagtcaggtcttggtttagggctttgctgattgtcttaggaaagtgataaaagaaaatgcttataatgcagattaaatttaaaagtggcttgggtctatagctgctacactgcaaagagaatgaaatcgtctaacaatatttaaaagctattattgctccgggcgccgtggctcacacctgtaatcctagcactttggaaggctgagatggatggatcacttgaggtcaggagttcgagactagcctggccaacatggtgaaacctcatgtctactaaaaatataaaaattagctggacatggtggcgcatgcctaatcccagctacttggaggctgaggcaggagaattgcttgaacctaggaggtggaggttgcagtgagccaatatctcaccactgcactccagcctgggcaacagaatgagactccatctcaaaaaaataaaataaataaaaacaaataaaagctattatctggctgggtacagtggctcacgcctgtaatctcaacactttgggaggccgaggcgggtggatcacttgaggccaggggtttgagaccagcctggccaacatggtaaaaccccatctctactaaaaatacaaaaactagccaggcgtggtggtgtgcacctatagtcccagctactcaggaggctgaggcaggagaatcacttaaacctgggaggtgaaggttgcagtgagctgagatcatgccactgctctccagcctgggtgacagagtctcaaaaaaaattaatttaaaaaaaaagctattatctcattcatcatagaagttataccattgaacaaatgaagttctgatgtacatagtgctaaagctaaaaaacatttcagtttaatataatttatgtgagggtgagaaatagaacagtatatcacaagtcagatttaataacattgaatttattgggaagagaatggattgggatgcaacttcatttgtccaatcatgtttgagttgcaactataaactggccatggatacaagattcagccaaaacccacaaaagaattctgtgagagctgattggctgtatggaatttcctgtatggtatattttattatttataaattgtgtgtaacacattctgtataacaggtttatatgcaggcatatgttttttaggagagctggttgttaaacttaccagcaccaccaggggcgtggtgtgtgtgttgttattctcggctcagtcccagagaacagaatcaagtctagttaatataagtagcaaaagatttattgccagatatcaattggcagttccttctcctccttgatatttgcttcctctgtgctaaaattttgaggtgatcacctctgccatatctctccaaatttaactctaagctctttgatactatatagccagaaaagatggggggatgtgtggtgagggatagaaatcctttacaatattttctttaatcagcataatgattacattctgactggcagaaagcggggggtggttcttcatctgttttgcctccattgcttcacctgtgaaatggtaccaatcaccccataaagtctggtaaggatgagaatcagtttagtacatgcttactcagtgagcattcctcccgcaatccagtgcttctcaaagtgcggtggctggaccagcagcaccagcagcacttgggaactcatttcttcttcttttattttttttttttgagatggagtttcattcctgtcgcccaggctggagtgcaatggcacgatcttggctcactgcaacctccacctcctgggttcaagtgattctcctgcctcagcctcctgagtagctgggattacaggtgcccgccaccaggcctggctaatttttgtatttttagtagagatgggatttcaccatgttggccaggctggtctcaaactcctgacctcaggtgttccaccctcctcggcctcccaaagtgctgggattacaggcatgaaccaccgcgcctggcggggaactcatttcaaaatgcaaattctcaggcccacccaagagctactcaatccaaaactctaggaggaagggctcagtgatctgtgttttaacaaggcttccaggcgattccaatgcacactgatgtaggagaacccctgacctaagggaggaattttcaaattttggtaagcatccagacatgtagggtgcttcctgagggaggaattctcaaactttggtaagcatacaaacacatagggtgctttttaaaaaggcagatttgctgtctcaccccagagattgattcattaactctggaatctgcatttgagcaagtgctgtaggggattctaatgcaggggtgctgagccttcattctgagaaaaataatgcggaagtcactaaaggacagcaaggtagggagctcttggccagaagatgaatctggtttgttccttacagtgttttattaaaatctgatttaatcatcaatgtgaagattttatataaaaattctgatttctggcttttgagaattcagaggatcaggcaacaacaagccatattttggtacagcaccccctcccccaccccccgaccctggttggaaatgaaaagcaccagccccctctaaaggactgctcttttctctctttttttttcctgcctggccagcgttttttgagtgttcatctctgggagggagatcaagctgtcccgactcctgtagtttactcatattaccactagagggcaaaatcagctgcgggtggctggacacccctgggacctcagaaagctagagaagatttcctgatggcatcgaaaacttaatgcacactttcaactcatttctaacagtttatcactgggggacacatagtggaactgttctctccatagatgcaattaaagacctactaaatacttgaggaaaccgggctcatgttgtttctctggcacctgcagttcccctatagctcaaaaaaaagaaaaaaaaaagtatgcagtaaagatttcaaatctaaactttacagcttcataaatttttatatatgtatacacctgagtgatcattacccaaatcaagataaaaaacatttccactactccagaaggctctcctgtgctccttcctagacaaaatccccccacaaagcttaatactcttaagacttatgtcaccacaggttacttttgcatgtttttgaacttcatataaatggaatcatacagtgtgtattccttgtttctgacttcttttgctcaactgaatatttgttatttttaattttataaattatggtgtgcatagaataatatgtgaccattaaacatgatactatagaaccatattgtttggcatgaaaagaggtatttgatatattattgagtttcttaaaaagttacaagagtctgttttatgtaaatgaattcgttgatgaaaaattgtagatatacatcttatatgttcatagagaaaagtttgaaataatattcactaatatgttactactagttatttctgagtgtcaggattaatgtagtttttatctctatgtttttatgtctggtttgaatatttttaaactttcaattttggaataattttaaatttataaaaaaattataagaacagtacaaagaactcctgtagctggaactacaggcatgcaccaccatgcccagctaattcagctaatctttttttttttttttttttttttggagacagaatttcactcttcttgcccaggctggagtgcaatggcatgatcttggctcatggcaacctccgcctcctgggttcaagtgattcgattctcctgcctcagcctcctgagtagctgggattacaggcatgcgccaccatgcccggctaattttgtttttttttgtttgtttgttttgttttgtttgagccagagttttgctcttgttgcccaggctgcagtgcaatgatgcgatcttggctcactgcaacctctgcctcctgggttcaagcgattctcctgcctcagcctcccgaatagctgggattacaggcatgtgccaccacacccggctaattttgtatttttagtagggacggggtttatccatattggtcaggctggtctcgaactcccgacctcaggtgatctgcctgcctcagcctcccaaagtgctaggattacaggcgtgagccacaaggccggcttaatttttgtatttttagtagagacaaaataattttgtgttgccatgttggccaggctggtcttgaactcctgggctcaagtgatcttcccacatcagcctcccaaagtgctgggattacagtccgtgagccaccgtgcctggcttatatttagttcttatgcttcttcagttacttgaacttcgtatggtgagtaaataacattttcatttaaaaaaaaaaaaagaaaaaaaaaaagcaccaggctgggcgtggtggctcacacctgtaatcccagcactttgggaggtcgaggcaggcagattgcttgaggtcaggagttcgagaccagcctggccaacatggtgaaaccccgtctctactaaaaatacaaaaattagccgggcatggtggcacatgtctataatcccagctactcaggaggctgaggcaggagaatcgcttgaactcaggaggcagaggttgcagtgagccgagattgccccattgctctccagcgtgggtgacaaagtgagactccatctcaaaaaaaagaaaaaagaacctgaaaccacttgcattaagcaaataaaacaaaatgggataagatgcaattaagagagattttcttcaaagcctggcctacctggagccttaggggttaacccttttcctatgtcccttgctgtgttcagggcagctgtgaagtcctgcggctgttggaccttggggcctccccttcctaccgtagatggatctggcagcacctggagctgatagatggcagacctctgaagacccacctgagtggtaagctgccttggcctgtctgacagcagggggcgcctgggcctgtcctgtttccagttcccagcacatagagccttagaaatctagtcagccagcctgacagcgtatatcatctgcacccttctaccagcggtggaaacccagtctgcaaggccctgccctcctttccagccttttttttttattgagccttttcccttttgctgtttaggttctcccacgtgaccatcaactccttgcctcacatatcccccaccctttttttcacccagctctcttctgctttttaaaatttatttatttatttgttcattctgtctctggatttgcctgtgatggacttttcatataaatagcatcatacattatttggctttttgcatctgacttccttcactgagcaccatgttttcaaggtctatttatgttgtagcagatatcatttcttcattctgttttatggctgaataatattctaatgtatgcatataccacattttttttgtccacttatcagttggtgaacatttggattgttttcactttttggctgttttgaataatgttgctatgaacatttgtatgcaagtttttgtgtgaacatatttttcagttctcttgggtattacctatatgcctaggagtggaatttctgggtcatatggtatcttagtcagttttctatttctataactgaatatctgagactgggtaacttataaagaaaagaaatttatttcttatagttctggaggctagggaatctgaggtcgaggggctgcatctggtgaaggacttcttgctggtggggactcttcagagtcccggggcagcaaagggcatcacatggagagggagcacttctgtctttgagatcttagactacacattcttccttgaagaagtcttcctggtttctcatgctggaccagatcttccatcctctgctatatgccattctagtacccttcaagtaccattcaagtactcttctgtgttatataaccccactgaaatcatacaactgagtctgaaatgcttattaaacatctgtttcccttgctagaatataagctctatgaaggctttgcattcccagggcttcgtattatgcctggcatctagcaggtgctcagaagtgaattacagagttaatggataaacatattttggctgctgtgtgtggtttggacacatcctaggctgtgaatgtatgcgcactctccacagccttatcccaactcagtaacaagtatgaataacagtgatcatttattgaattctaattgtatgtttattatattgggcttgactgtttatacatattgcataattctcataatagctctctttttgttttttttttttttttggagacagagtctcactctgttgcccaggctggagtgcagtggtgcagtctcagctcactgcaacctctgcctcccaggttcaggcaattctcctgcctcagcatcccgagcagctgggattacgggcacatgccaccatgcccggccaatttttgtttttttagtacagatgggatttcactgtgttggccaggctggtctcgaactcctgaccttaagtgatccgactgcctcggcctcccagagtgttgggattacaggcatgagccaccgcacctggcctaataactctttaagaaggtacgattgtaccatctgacacatgaggaaactggctcatagggcaaataagtagcaatgtaggactgtagagttgggattctaacccaggcacaactggttccaaagcccagactttcttctcttcataaatatctccagccttcttcattctccatttcctgttgttggacatagacgttgtcaagtagcagcctctagaactggccagggtgataaccaggcttgctgattctagggtagtattgtttccattcacagctctgtaatggcatttttatttatttttttccccttccatcctctgcagatctttttgtgtcacccacttgggtcaaggaccccagccctcaacagatatttgcagtggctcagatgtcttatctcttacctcctgctcagtactggcatgcttccccccacttcccttgagattgtaatctgtgtatcctggggcctcctccccaaggattgccttatagatatagcagtcctcctgagattagaactgaggccaacacagggtggcgaggagaagggcggaaaaaggagaggttggagctgaacagagctgggtttgagtcccatttattagctgggtagctttggtgagtactcaaagtctctgggcctggtttcttcatatctaccttgggtagtgtcatggttagcagcataggcttggagtccactgcttctgtttgaatacagggtccttctcttattagtgatgtgatactgggcaagtgggccctatgtctaagtgcaccagtgccctcagagtctgtaaaatgtaaataatggtccgtacctcgtaggattgtaatgacattaagcaaattaatatataaaaactcttagaacactacctggctgcataggcagatggcagatgtttgttatcattaccacaacaggctgctaggaaggcagagtgagatgatgtatgcatgaggccttataagtactcagtaaatgtttcttctcatgtcaattcttgtttgtcacttttccactgtcaatccaccagagaaaaagttgcatcccacaaattttgatatgttgtattttcaatgttattcagttcaaaatacctttaaatttctcttttgatttcttctttgacccatggaatatttagaagagtgtttagtttccaagcatttgggggattatccacctatctttctgttactgatttcttttttctttttctttttttttttttttttttgagagggagtctcgctctgtcacccaggctggagtgcagtggtacaatctcagctcacttcatcctccaccccccaggttcgagcaattctcctgcctcagcctcccgagtagctgggattacaggcatgcaccaccaaacccagctaatttttgtattttagtagagatggggtttcagcatgttggccaggctgggcttgaactcctgacctctggtgatctgcctgcctcggcctcccaaagtgctgggattataggcgtgagccaccacgcctggcctctgttattgaattctaagataacatactttatatgatttgaatcctctgaaatgtattaaaacttgttttatggtccagaatatagtctgtcttggtaaatgtttcatttgcatttgaaaaaaacttgctgttttggggtgcagtgttctatgaatgttaagtaggtgaagttggttgatagtattggtcaagtcatctgtacccttataactttctgtctacttgctctatcaattgttaatagaggctggcgtggtggttcacgcgtgtaatcccagcactttgggaggccaaggcgggcagatcacctgaggtcaggagttcgagaccagcctggccaacatatagtgaaaccctgtctctaccaaaataatacaaaaattagctgggcatggtggcgcatgcctgtagtcccagctacttgggaagctgaggcaggagaattgcttgaacccgggaggcagaggttgcagtaagccaagatcacgccactgcactccagtccgagcgacagagcaagactgtgtctctcaaaaaaaaaaaaaaaaaaaaaaaaaattcttaatagagttgttaaaatctccagccataattatagatatatttttctccttgtatttctgtctgttttgcctcatatattttgaagctcttttattatatgcatagatgtttgggattgaactcttaattattatgaaatgaacttatttgtccctggtaatattctttgctctaaaacctactttttctgatgtaaattcagccacttcttttgatttagtgtagcttcctcttgattagtattagtttggtatatctttttccatccttttgtgtttaacctatttgtgtctttatatgtaaaagtgaatttcttaaaggcagcatataattggatcttgctgaaagacccaatttttattgagatgcctaatcattgacatttaatgttaatattgattatggttggatttgactctaccatcttgctatttttctttctatttgtcacatctattccctttttcttctgtttttccctgccttttggattatgtattttgtataattcaatcttattttctttgttggcttattagctgtttgtggtattattttcacagttgctttatgatcattgtatatacttttaacttatcacagtctacctttaagtgatattataccacttcatgtatagaatcagaatcttacaatgatatatttccattttctcctcctagatattatgctattgtgatatattatactttaatgtatattaaaaaccttaccatacatggttattacttttgctttaaacaagtatcttctttttttttttttttgagacggagttttgctcctgttgcccaggctggagtgcaatggcacgatctcggctcactgcaacctccacctcctgggttcaagtgattcttctgcctcagcctccctagtagctgggattataggtgcctgccaccatgcccagctaattttgtgtatttttagtagagacagggtttcactatgttggccaggctggtcttgaactcctgacctcaggaaatccacctgcctcagcctcccaaagtgctgggattacaggcatcagccaccatacccagcttaaacaagtatcttttttgtatatttaaaaaataataagaaaagactcttatgttaacctacatagttactatttctgatgttctttgttcctttgtatagatccagatttctacctaataaccacttccttctgcctgaagtacttcctttaacatttcttgtatttcagctctgttagtgatgaattatttcagcttttctatgtctgaaaactattttatcttcatttttgaaagaaatttttgctggatataaaattctaagttgacaggttttttctttcactactttaaagatgttgcattaaagtcttttttgacttgcattgttttcagcaaatccgttcatatttttatttattgttttcaacaagaagtccgttaacattttatttatttatttatttatatttttgagacagagtctcactctgttacgcaggctggagtgcaatagtgtaatctcggctcactgcaacctctacctccctggttcaagcgattaccctgcctcagcctcctgaatagccgggactacaggcatatgctaccatacttggctaatttttgtatttgttgttgttgttgttggtttctgagatggagtcttgctcttgtcacccaggctggagtgcaatggcacaacctcggctagctgcaacttccgcctcccagtttcaagtattcttgtgcctcagcctcacgagtagctgggattataggcgtccaccaccacgcctggctaatttttttttttttcatttgtgtatgaaattttttttttttttttttttgatcattcttgggtgtttctcgcagagggggatttggcagggtcataggacaatagtggagggaaggtcagcagataagtgaacaaaggtctctggttttcctaggcagaggaccctgcggccttccgcagtgtttgtgtccctgggtatttgagattagggagtggtgatgactcttaacgagcatgctgccttcaagcatctgtttaacaaagcacatcttgcaccgcccttaatccatttaaccctgagtggacacagcacatgtttcagagagcacagggttgggggtaaggtcacagatcaacaggataagaatttttcttagtacagaacaaaatgaaaagactcccatgtctacctctttctacacagacacggcaaccatccgatttctcaatgttttccccacctttcccccctttctattccacaaaaccgccattgtcatcatggcccgttctcaatgagctgttgggtacacctcccagacggggtggtggccgggcagaggggctcctcacttcccagtaggggcggccgggcagaggcgcccctcacctcctgggcggggcggctggcagggtggggggctgacccccccacctccctcccggacagggcggctggccgggcagaggggctcctcacttcccagtaggggcggccgggcagaggcgcccctcacctcccagacggggcggctggccgggcggggggctgacccccccacctccctcccggacggggcggccggctgggcggagacgctcctcacttcccagacggggtggctgccgggcggaggggctcctcacttctcagacggggcggctgccaggcggaggggctcctcacttctcagatggggcggttgccaggcggagggtctcctcacttctcagacggggcggccgggcagagacgctcctcacctcccagacggggtcgcggccgggtagaggcgctcctcacatcccagacggggtggcggggcagaggcgctccccacatctcagacgatgggcggccgggcagagacgctcctcacttcgtagatgggatggcggccgggaagaggcgctcctcacttcctagatgggatggcggccgggcagagacgctcctcacttcccagactgggcagccaggcagaggggctcctcacgtcccagacgatgggcggccaggcagagacgctcctcacttcccagacggggtggcggccgggcagaggctgcactctcggcactttgggaggccaaggcaggcggctgggtggtggaggttgtagtgagctgagatcacgccactgcactccagcctgggcaccattgagcactgagtgagccggactccgtctgcaatcccggcacctcgggaggccaaggctggcggatcactcgcggttaggagctggagaccagcccggccaacacagcgaaaccccgtctccaccaaaaaaatacgaaaaccagtcaggcgtggcggtgcgcgcctgcaatcgcaggcacttggcaggctgaggcaggagaatcaggcagggaggttgcagtgagccgagatggcagcagtacagtccagcttcggctgggcagcagagggaaaccgtggaaagagggagagggagagggagaccgtggggagagggagacggagaaggagagggagagggagagcctaatttttgtatttttagtagagatggggtttcgccatgttggccaggctggtctcaaacacctgacctcaagtgatccacctgccttggcttcccaaagtgctgggattacaggcataagccactgcacctggccaacatttttatttttgtataaactctttatataaccttgtatattttctgtacacagtgtacctttttgctttggctgattttgaatttttttatcaatagttttaagcaatttgattatgttgtgccttggtataatttttgtcatgtttctgtgcttgaggttcatttagtttctgggattcctgggtttgtatttttaaaatctgatttggaatattttgaccatgattttttcaaaaaaattatttgtctctccctctcctccactttgagaactccaattacatgtatattggattgcttacaatccaatatattattggattgcaacatgtatattggattgctgtgtttcacagctcactgatgttctgttcattttttttattcttttttttttcctctgtgacattttggatagtttctattgctatgtcttcaagttttctaatcctccttctgcattgtctaatctgctgttaatcccacctagtgtacttttcattttagacattttagtttttatatctcaaagtttgatttgggtctttttataatttccacaactctacttaatatacacaatattttttccttggaatataattataatagctcttccaatgcccttatgtactaattccatcatatgtgtcatttctgagtcagtttcaatccattgtttccttttcatatagtttatattttcctacttctttgtatccttcatgattttttaataggatgctagaaaatgtgaattttgagtactgcatattttttattcctgtaaatatttctgaacgttaagatgtagttacttggaagtattttgatcttttcaaggcttgcttttaaatttgttatgtggggtcagaacagtgtttaatctagagctagtttcccattcgtgaagtaaaaccattttgtgtatttcagaatgccccatgacttgagaggttttctattctagttattgggaaaaggactatttctggtcctgtttgagctctgatgatttatccctctaatcatttggggtgattctttccccagccttgggtagtatactatgtaacaaattgccccaaaacttagcaacttaaaataacagacatttacttctcccaatttctgtgagtcagaaatttgggcacagcttagtttggtgcttctgactcaagacctcttatgaaccagctacttgggaggctgaggcaggaggatcatttgagtccaggaattcaagaccagcttggaaaacatagctggactccatctgaaaaaaaaaaaaaaatctcttgaggttgccattgtcagccagggttgtggtctcatctgaaggctcatctgggagggacctgcttccaggctaactcacgtggctattggccaagtgtctggcctcatgggtgtctctacagggcagtttcatgacatgtttccccaagaatgagagagagcaacagagaacatgcccaagatggaagccacagtttttttataacctaatgtcagaaataaaatctcatcacttctgctgtatcctgttagacgtgagcccaacccacacttaatgggagggtattacacaagtgtgtgactagtaggaggtggggttcactggtggccatctcagaggctgcctaccactggtagtttcccaatacacatgtgctgattaatactcagctgagcttcaggggaaactctctgcagatctttggagttctgtctctatgcagctctcttctctctggttccctgctctgtggactctagctgccttgccctcccctgactatgtcttctgtctcatcaattcaaggagattgctgggctccatctgagttccccctccctgcaccatggcccagaaaatctttaggcagcatgctggggcagtagtagggctcacctcatttgttttctgtcttgcatcatggatgattgtcctttattgcctgatattcaatgtctttttttttttttgagacagggtctcactctgtcacctaggctggagtgcagtgacctgttcatagctaattgcagcctggacctcctgggctcaagcagtcctctcgcctctcctgagtagctgggactataggcatgagccaccacacccacctaattttttatctttttgtagagatagagtctcactatgttgctcaggctggtcttgaactcctggcctcaagggatcttcccacctcagcctcccaaagtgctgagattacaggcatgagccaccgcatctatccttcaatgtctttaaaacaattttttccataaatgttgtccaatattttcaagtagaagagaaaatttagtccctgttattccatcttggctggaagcaaaagcagaagtctagatctatgtttttaatagttgagttttattctattatatgcatatatcataattaatttaattaccttttacagatattttgaattctttttcaaatgtttaccctactgtggcagatttcctggtgtgtttgtctttgcatctgtgtgcaaggaaacgtattagacaaattctgagaattactggatcaaatagttcagcggtccccaaactttttggcaccagaggctggtttcgtggaagacaattttttcacagatgggggcaggtggtaacgcttttggaatgaaactgttccacctctgatcatcaggcattagatggagcacacaacctagatgcctctcatgcacagttctcaatagggtttgtgctcctatgagactctaatgccgccactgatctgacaggaggtggagctcaggtgataatgctcatgcacctgccactcatctcctgctgtacagcctcattcctaacaggccacggacctgtaccagtccatggccaggggattggggacccctgaaatagttaatccagtgcatactgactacatacatttaaaacattggtagatgttgttgaagtgcctttccgaaagatcaaactcagggctttttatatgtgttttgttaagccagacctactgcttgtggaacttggatttattcccattaacattaatttgaggggccgggcatggtggctcacacctgtaatcccagcactttgggaggccgaggtagacggatcacgaggtcaggagatcgagatcatcctggctaacacggtgaaacgctgtctctaataaaaatacagaaaaattagccgggcatggtggcgggcgcctgtagtcccagctacttgggaggctgaggcaggagaatggtgtgaacttgggaggtggagcttgcagtgagccgagatcaagccactacactccagcctaggtgacagagcaatactccatctcaaaaacaaaaaaacaaaaacaaaacaaaacaaacaaaagacattaatttgaagagttgattctcatactagagattttttttttctttttttttttgagatagagtcttgccctgtcacccaggctggagtgcagtggcacgatcttggctccctgcaacctctgcctcccaggttcaagcaattctcttgcctcagcctctggagtagctgggattacaggcatgcaccaccatgcccagctaattttttgtatctttagtagagatggggtttcaccatgttggccaggctggtctcgaactcctgacctcttgatctgcccgcctcggcctcccaaagtgctgggattataggcatgagccaccacacccggctggagatctcttttttaatcaatgttcttgacgtataatttttatataatagagtgcacatattttatgtgtatagttaaatgacaaattagaaaaaaaattctttttgagacaaggtttcactttgtcacccagtctggagtgcagtggcatgaacatggctcaatacaaccttgacctcccagactcaagtaatcctaccactttagcctcctgagtagctgggactacagtcacatgccaccacaccctgctaatttttgtatgttttgtagagacgggggtttgccatgttgcccagactggtctcgaactcctgagctcaagcgatcctcctgccttggccttccaaagcgtgggattacagtggcgtgagccactgcgcctggccatagttccatgacaaatttatacctctacaatcaagttatagaacatttccatcaccccacaaagttcccttgtgccgcctcccagtcaatctctacccctcacccttgccctaggcaaccactgatttgttttctatcattataggttagatttgtcttcctatggtttcatataaatgagatcatacaggccaggcatggtggctcatgcctgtaatcctagcactctgggaggccgaggcaggtggctcatgaggtcaggagattgagacaatcctgactaacatggtgaaaccctgtctctactaaaaatacagaaaattagctgggcgtggtggtgggcgcctgtagtcccagctactcaggaggctgagacaggagaatggcatgaacctgggaggtggagcttgcagtgagcagagatcgcaccactgcacttcagcctgggcgacagagtgagaatcctctcaaaaataaataaataaataaataaataaataagatcatacagtatggactcttgtttctggcttcttttacttagcatgctgagtagtttgctcctttttatttctgaattatatttccttcgagtttttttaaatttcattttaagagatgaggtctttctatgttgcccaggctgaagttgagctcctaggctcaagcaatcctcctacctcagcctcctgagtagctaggactcaggtgtgcaccactgcaactggctcttggtgatctttttaaataactctcatggagggcctattatatgtcggtgctgtgctaggcatatcacatactttatctgcaattcttttttttgaggcaaagtcttactgttgcccagactgcacacagtgttgtaaacacagctcactacagcctcaacttcctgggctcatgcaatccttccatctcagtgtccccagttgctagagctacaggtgtgcaccagcatgcctggctaattctttaatttattgtagagatgaggtcttgccatgttgcctaggctggtcttgaactcctgggctcaagtgatcctctactttgatctcccaaagtgctgggattacaaatgtgaactaccatgcacagcctgtaattcttacaatagttctatgagagggctctgatgcttatatgacttgtccaaagttccatgaccagtcatccatttatctcttattgctgactctgccccaatttgaaagcccagtttgaaggccgggataaatatggtctgttaatggaatgaatccaagagacctgagttcaaatccaagctttaacctttttctgggtgacttgagctctctgctgttcatcttatctcttaaagtgtgttaatcacccttctccagatgtaatagatgtaaaggctctagcgcagggcctgccacccagggacattacatggaggccacagtgttttatctttcttttttttttaaaaaatttccccatgtgctagaccatccaggcaggttcctgtgataagcttcaactactaccaccataaccatcatatatgcaaagatccataagtatcttttcctgtgctttctctaacagaatactctcctatggaaagatttaaggaattccagatcaaatcatatcctctgcaagactttagctccttgaaacttccacatctcaaaaaagcctgggggctacaggggacaagcttcagcaggaagatcagaacctcaggagacactctccccaagatgctgggcccgaagatccagtaagctcagccctgggcagatagacgggtccagattgtggttgcaaagggagataatacttatatggcagaatgtcagggatgcggataaggggcaaaggtggaggacacaggtcaatcccaaaggattgtgcatgaggcaacctagagatgtcctgggtctgagagccaggacctgcattctccacctgtaactcacaaggctacgtcaggcattcagccacttcttttctcagggcctcagtaacccatttaaggaagaaggggctggacatatcttctggctctgacattctgtcagtctgtgtgtttctgggcccttttgattctgagctgcttcagaaaattctgtccatctaaggaaggcagttacagcatagtagataagagcctgtgtttggaattaagcctggcttggccacttattttagctcttattttagaggtcaagggacttgacctctctaagctgtatttcttggtagataatagcatctaactcttggggttgttgcaagccagcaattaaatgagataatgataattatagttaacacttacagagtattttttgtagctgggcatagtggcacatacctgtaatcctagctactcaggaggctgacacaggagggtcgcttgagcctaggaagttgaggctgcatgcagtgagctgtgatcatgtcactgtaccccagcctgggcaacagagcaagatcttgtctctctctttttttttttttttgagatggagtcttgcactgttgcccaggctggagtgcagtggcgcgatctctgctcactgtaagctccgcctcccgggttcacgccattttcctgcctcagcctcccgagtagctgggactacaggcacctgccactgtgtctggctaatttttttgtatttttagtagagacgaggtttcaccgtattagccaggatggtctcggtctcctgacctcgtgatccgcccacctcggcctcccaaagtgctgggattacaggcatgagccaccacgcccaaccgaccctatctcttaaaaaaagaagaaaaagaaaaagaaaaaggaaacaggctgggcatggtggcttatgcctgtaatcccaacactttgggcggctgaagcgggcggattgcctgaggtcaggagttcgtgaccagcctggccaacatggtgaaaccccgtctctactaaaaatacaaaaattagctgggtgtggtggcggatgcctgtagttccagctacttgggaggctgaggcacaagaatcgcttgaacccaagaggcggaggttgcagtgagctgagatcacgccactgtacttcagcctgtgcaacagagcgagactgcatctcaaaaacaaaacaaaaccccttttctgtgcccagtactgaattatctaatttaatctctgtaacaactctacgagtactattataatcattcccatttttcaggtgagaaaaccaaggtacggggagagattgagttgtttgttccaggttgcgcaggtagaaagtggcagagccaggattcaaacctgagcagctcagtgttgttatcggtatgattgtcacgactggtatgaggcagatgcacattggggtgctgtgcttttgttttttctggagagactgaagagcagaagaggagactcagtggggaccagcctagaatcagctcattgctgggcccagagcagcacagccccctccccctgctacttttgaaattgaagtgtcataatgagactaacaatggcaccagtgtcacaatccctgcattcctacaagggccacttcacgtgagtcctttgcctgttaacatttccaagctcctggcctccataacgagcaccctgtgacttttgagacgttatggataatccttctgaagaatctaggttgcagtgagccaagattgtgccactgcactccagcctgggcgacaagagcaaaactctgtctcaaaaaaaaaaaaaaaaaagaaaagaaaagaaattccttcctcttggctgggcgcagtggcttacgcctataatcccagcactctgggaggccaaagcgggtggatcacttgaggccaggagtttgagaccagcctgggcaacattgtgaaaccctgtctctgctaaaaattagctgggcatggtggtgggtgcctgtagtccctgctacttgggaggctgaggcatgagtatcacttgaactccagaagtggaggttgcagtgagcagagatcccatcagtgcactcgagcctggcgacagagtgagactccgtctcaaagaaaaaaaagaaaaaaaaaaagaaagaaattccttcctcatgctgagcatgagagggccagcctggacttcccacccattaggcctggcttggctgcatgggatcatcagcccctgcctccaggagaacagccctcaggtgtttaaggggagggcctgtatcaccttcctctcccaagtctcctctttcgcaccctccaattcctgacaatgggagtcagggcttgattttgagttttctcgccttctgggaagttgtgaattccccagggaggggagccctccatgtgcagaagagtgagggctgattagccagggcctcaggagcagactgtgttacagatgagctctctaacaagctgtcacatttcagatccaggcctgctcagtcgatcaaatgtgccatgatcaatatcaagcctggtgagctccccaaggaggctgcagtgggggcctacgtgaaggtgcacactgtggagcagggagaaattttggtgagtgtgccaagagctctgttcaccatggagtacgtaacatgaatgggctggaatgttaagtaatgacagtaaaggtttaaaaacacttccctccatatttgatattaaggaattatgttgatttgtaaagatgtgataagaataggccgggcgcggtggctcacacctgtaatcccagcactatgagaggccgaggtgggcagatcacaaggtcaggagtttgagaccagcctgaccaacatggtgaaaccctgtctctactaaaaatacaaaaattagctgggcatggtggtgtacgcctgtaatcccagctgaatccaggaacaaggcaaagatgttccctcttaccactcctattcaacattgtattgaaagtcctagctagtccattcaagaaaaggaaataaaaggtatacagattgggaagtaagaaataaaactatctttgtttgcagataacattattgtctatgtagataattccaaacaatttttttaaaaagaaaaacctcctgaaactaatgagattatagcaaggtcacaggatacaaaattaatatagagagtccattgctttccttataccagcaatgaacaattgaaatttgacatttaaaaacacaataccagctgggcacagtagccccagcactttgggaggctgaagcgggcgaatcacttgaggtcaggagttcgagaccagtctggccaacatggtgaaattccatctctgctaaaaatacaaaaattagctggggccaggcatggtggctcacgcctgtaatcccagcactttgggagcctgaggcaggttggatcacttgaggtcaggagttcaagaccagactggccaacatggtgaaaccccatctctactaataatacaaaaattagccaggcatggtggcacacacctgtaatcccagctactcgggaggctgaggcaagagaatcacttgaacctgggaggcggaggttgcagtgagctgagatagtgacgttgcactaaagcctgggggacaagagtgaaactccgtctccaaaaaaaaaaaccaaaacccaaaccaaaaagccaggtatggtggcaggcacctgaaatcccagctatttgggaggctgaggcacaagaattgcttgaactcaggaggcagaggttgaagtgagccgagattgtgccactgcactcctcttgggtgacaagagcgaaactccatctcaaaaaaaaaaaaattaataacaaatacataaattacctaatatttttatagaatctaatttctaaaaaattcaatttctaggccaggcatcgtggctcacgcctgtaatcccaacactttgggaggccacctgaggttgggagttcgagaccagcctgaccaacatggagaaaccctgtctctactaaaaatgcaaaattagccaggcatggtggacacctgtaatcccagctactcgggaggctgtgtcaggagaattgcttgaacctaggaggcggaggttgcagtgagctgagatcgcgccattgcactccagcctgggcaacaagagtgaaaatccgtctcaaaaaaaaaaaaaaaaaagaattcaatttctaagaaatccattatgaaaaggctaaatattgcatgattccaattctatgacattctggaaaagaaaaacactatagagatagtaaaattatcagtggttgcaagaggtttggagttcaggagatgggatgaataggtgaagcacaggggacttttagggcagtaaaattattctctatggtactgtaatggtggatacaaaagcatttgtcaaaacctatttaattttacagcacaaagagtgaatcttaatgtatgcaatttgttaaaaaagaaaaaaaatcagccaggcatagtggctcacgcctgtaatcccagcactttgggagtacgaggcaggtggatcacgagatcaggagattgagaccatcctggctaacatgatgaaaccgcgtctctactaaaaatacaaaaaattagccaggtgtggtggtgggtgcctttagttccagctactcgggaggctgaggcagaagagttgcttgaacccgggagttggagcttgcagtgagcagagatcgcgccactgcactccagcctgggcaacagagcgagactccatctcaaaaaaagaaaaaagaaaaaaatcatctaggaggttagtggatctgaggaaggaatacaaactatgacaagataatctaaccattataaatgtatgaaacaatctctgtgaaggagttggggggaaaagatgctgacttaagtaactttggaaatgagtggaactggtaagactaaagcaaaaggaactgtgtctgagcactgtgccctagtgataaagctgtttgtcatgaaggtagggattaacaatacttctactactatacatgtacacagtgttaacactgaaataaatcagttcagtaaatggatggcagagggtgggagccaggtttttcacaatttaagcaggaatatatagaaagcagggggagcctagaatactccatgtagtaatggattagagttgaaaacatcagtagtcactgaaatttaactcaatatatacttacagataattatgtatagaaatatgtataggtaggccaggtgtggtggctcacgcctgtaatcccagcactttgggaggccgaggagggcggatcacgaggtcaggagatcgagaccatcctggctaacacagtgaaaccccgtctctactaaaagtacaaaaaaaattagccgggcgtggtggcaggcacctgtaatcccagctactcaggaggctgaggcaggagaatggcgggaacccgggaggcagagcttgcagtgagctgagattgtgccactgcactccagcctaggtgacagagcaagactccatctcaaaaaaaaaaaaaggaaatatgtataggtatgggtggaaacatacaactgttttgctctgtcagataatagggcctaaaagaaatgttacccttccagcaatgagcacacttaacacttggatcttggttggtttcttttctttctttctttcttttttttttttttgacagagtctttctctgtcacccaggctggagtgcagtggcgccatctcggctcactgtgacctctgcctcctgggttcaagtgattctcctgcctctgcctcctgagtagctggcattacaggcacacgccgccatgcctgactaactttttgtatttttagtagagacggggtttcaccatgttggccaggctggtctggaactcctgacctcatggtccacccacctcggcctaccaaagtgctgggattacaggcatgagccactggacctggcctcttttattttttttttaagagacagggtcttgctctgtcactcaggctggagtgcagtggcaagtgatcatgggtcactgcagccttgaactcctgggcccaaccaatcctctcacctcagtattctgaatagctgagactacaggtgtgtgctgccatgcccaactaattttttttatttttcgttagagacagggtctcactatgttgcccaggctggtctggaactcctggcctcaagcaatactcccaccttggcctcccaaagggctgggattacaggcgtgaaccatcgtgcctggcctccatactgtttttcatgatggctgtactaatttatattcccaccaatagtgtgtgagggttcccttttttgcaaatctttgccaacatttgtcatattttgtctttttgatagtaaccattttaacaggtatgactcaacatctcattggattttcaatttgtatttccatgatgatcaatgatgttgagcatttttttcatatacctgttggtcatttgtatgtcttcctttgagaaatgtctattcagagtttttgcccacttcttaaccaggctgtttgatttcttgagactgtgttgtttaagttcattatacattttagttattatccccttatcagatgtacggcttgcaaatattttctaccattctttaggttgtctttttactttgttggttgtttcctttgctatgcaggagctttttagtttgatgcaatctcatttgtctatttttgcttttgttgcctgtgtttttggggtcataccccaaaaaaaaccattgcccaggccaatgtcaagaaaccagatcatgatttctaatacagtttcccaataaaaggaacaagggctctttggaagaatggttgaatctaggactagggcaggaaatacacaggatgagtctagaacatattgtaaatgccagaaagtaaggaagagctaggggagggggcaggaactgctttaatatgggagcatgtccaagggacatatgggggccacctaaaagatctcccaatggtcaaagctgaaacaatttgaacaacaaaataaagcagtgttggattataaccaaaagtacaaaataaacattcatgagtgcatattgatataaatgaattaataatgaattaataaatggaggagaagagacaaatctccctgcagaataaatttcaagcaatttatgtagatactctgtcttaaaggagagagtgcctaactctctacttaaatgtgggccatgcataggacttccttccaaagagtacagtatggcaaggggggaatgaagtaactttacaatggaaaaaatctgaaaaacacagccagatcatcaaggccaacatcaacagtaaaacatcatgttaatagtattgtcccttgacaggatgtgatgaaaatgtcatttaacctctgtggccatcctctcaatatcttataactcctgtctaatcatgagacgtgattagaggaaaatcatgagacaaattttaactgtggcatcccacaaaatactcaatgagtaccctcaaaactgccaaggtcatcaaaaatggcctgagaaaatgccacagccaagaggagcctaaagagccctattattaaatgtaatgttgtatcctggataagatagtggaatagaaaaagggcattaggtgaaacaggaaatctaagcaactcattgactttagctaacagtaatgtagcagtagaggttcactaattgtaacaaagacataccaatgtaagatgtgggaaactggatgtggggtatatggggactctctgtactatcttctcaattttcctgtaaatctaaaactgttttagaaaataagaccaccaggccgggcacagtggttcatgcctgtaatcccagcactttgggaggctgaggcaggtggatcacctgaggttgggagtttgagaccagcctggccaacatggtgaaaccctgtctctactaaaaatacagaattagccaggtgtggtggcacacacctgtaaccccaggtactcgggaagctgaggcaggagaatcgcttgaacccaggaggtggaggttgcagtgagccaggattgcaccactgcactccagcctgtgtgacagagtaagactctgtctcaaaaaaaaaaaaaaaaaggaatccaaggctgggcatggtggctcatacctgctgaagcccaggagttcaagaccagcttgggcaacaaagcgaaatcctgtctctacaaaaaattaaaaagttagctgggcatggtgacatttgcctatgatcccagctacttgggagggtggggtgggaggattgcttgaccctgtgaagtcgaggctgcagtgagccatgattgtgttactgtacttcaatctgaacaatagaatgagagcctgtctcaaaaaaaaaaaaaaaaaaatgcagttgtgggagcgagggcagtatggatgaccacgcttggctatgagctgatcactatggaagctgggtggcaggtgccagagctgaatgagaggaggaggagcagtgtgcgggtgcagaggtagggcaggagaagggatttcaggaggagcaatgggccttcggcctccctgtgcctgcagagggctgtctcctgaagcctcatgtgtggttattcagcatctgggaaactgttccctcaccaagccctctcctctgttcctctgtcactatctccaaggttgtccttatgccattctccccctgtgttatggtggactgtgcatgctccttccctccactcacaccagcctgtatgtcctcagggctgggaaggtcagtccagtactgtctgggaggtccagtccctagcacagccctctgtcaatgctgattattttttagctcttagaaatttcttccttttgtttagtaaaacattgcctcctacaactttaaactagctcctctcctctccctgccctgttccccaaaacagaagaaatccacttccttagcatgtgatgcccttaggtatttaaagaatgctgttttgtttttcattcaacatttatgtagccaggcacagtgccagtgttccgttaattattttcatattcacgcagagtggcctccattccttcggtcattcttcaaggggcgtaatttccagccttccagcctattgctcctcctggaaagcccttctgcctgccccacctctgcgcccacacaccgctcctcctgccactcagctctgtcacctgcctcccagcctccatagtgatcagctcacagccaagcgtggtcacccacactccccctgcccccactactggattcattgttttagtggtcttattttttagaacagtttttagatttacagaaaaattgagaagatagtacagagagtccccatatgccccacgcccagtttcccctgttattaacatcttacatttatacgtctttgttagagttagtgaaggtggtgtctgcttcacttcaatttattaatgtttcagagtaaggtgctcagagatgaacacagggcactaagggacagggaggcctgggcaggatggaggcacgaggatggaaaaggccttgctcagtttggtaggcagtgacaggaggggaggctgtgtcaggaacaggaacaacagggtctgttttgtccaggccctgcaatgctggaacagggagtaaggccttgatttcctagaagtcctggaaggctttgggtggggacttagcacaaggacctggctgctgcttcccacatagggccagcacatagaaagccttcaacaaatatttgttaacatgacccctttgaagaaaatgtctgcggatgccttcgtgaggtgcctgtggtaggactctgagctccctgtgttgaggccctggcttcagctgtaggagaatgagagtggtaactgcttgactgaacccgccccctggaaggtgggtcacatcgtcctcacccttgggagtagcagtgtggagctgggtcagccctgggagcagcagagggtggggcctagggtggagggacccaggttttgagccaggagatataggaagtccaacttctccaaggaacaggcaggctgaggcctctgaggtggtcaagactgggcaggccagagccatgggcagcgcagaagagaggtggcaagcagcatttcttattttcattctgcttctaatagttagctgtgtggccacgggcaaatcactttccctttctgaatctatgtcatgggaaaatgaggagattcatctgggtgagctgccacctctaaagttgtgtggctccatttgggtcactcattcagcagatattccttgagcacctaccatgctccaagcatggaacaaagtgccattgtggctgagtagactgacgtaattcctgcccttatggggcttatgatctagtcaggacagacaacaaacagataactagtaaatacatagaaagttacaaattgctgttaggaatggaatgaaaagcagggtgggtggggaggttcttaaatggggtagctaagggaagtctgctgtgaggaggtgatgtttaagctgagacctgaatgatgaaaataataagctatgggactgggcacagtggctcacacttgtaatcccagcactttgggaggccaaggaaggaggatggctgaggccaggatttcgagaccagcctgggcaacatgatgaaaccccgtctctaccaaaaacaaaaattagccgggtgtggtggtgcacacctgtagtcccagctactcgggaggctgaggcaggaggatcccttgagcccaggaggctgagattgtagtgagctgaaatcatgcaactgcactccagcctagggacagagtgagaccttgtctcaaaaaaagaaaaaaaaaaaaaaaaaaaaaaagaataagctatggaacgacctggcagaaaagtgttcaagacagacaagcagcaagttcaaggttcaaggcaggagggaggaggcgtgttggggggattggaagggagggcagggtggctggaacagactaagcaaggcagcagtgacatgaggctgagatggagggcttggaagggtgagacagcccaggccttaggcggcatgagatttatttgatcccaggtgctttgggatgctgtttgaagcatctagccagagaagcaactgactccagctgtgtgcatgcagcaagtgggttggaggtggctgagagagcaagcaggacagcagtgctcctgagtggatccctggttcaaggttgggctctgccactttatgtctcattaccttgggcaagctacttaacctgtttgtgcctcagtttcctcattgtagttgctgaaagcacagactctgaagacagaccacctgattcaaagcctaggtttattgctttcctgatgtgtgatgttagacaatttttcttttctttttcttttttttttcttgagacggagtctcgctgtgtcgcccaggctggagtgcagtggcatgatctttgcacactgcaagctccgcctcccgagtttatgccattctcctgcctcagcctcccaagtagctgggactacaagcacccgcaccacgcccggctaattttctgtatttttaatagagatggggtttcaccatgttagccaggatggtctcgatctcctgacctcgtgatctgcccacctcggcctcccaaagtgctgggattacaggcatgagccactgcgcccggccgatgttggacaattttcttaacctcagcatcctcacctgtaacatgagaataagaataggagtcagctcactggattgtggtgagggttaaatgggttatagatgcaaaaactacaaaagggcctggaatttagtgagtgctcaataaatgtttgttggtgctattattaccatttcatcatcattgctattgtaattataagatgattgaccgtggataggtaaatttcctttcctgaacctcattttccacatctgaggataacccccacatgctaggatggttgtaaggtgtaaattcatatatatatgtttcctctccagagtaggagctggctaaagagcagccattctggtttctatgcaagtcctggcattgactaggagggcctttgttcccactgtactcaacatgagagacacacgaggtgcttcatgtcccccagagaactctcacatgtgccatctcgtgtagaccctcagcagcttcagaggaaaggtggcatagctccaccccagtcttgccaaagagagacaaagccagggctcagagcacccaaaaatttgtacgtggtcatatttcaaggtctagaacccaaatggtggaggtggggagggtgttccagatcccacttcacatctcctttcaaattcagaatccttcggagacatgtcgatagatattctcacctgcatttcacaggcgagcaatggcccaggaggtactgtgtgccccaaatcacataagtacaattttaaaatatggaatcaatctaagtgtccgttaacagatgaatggataaggaaaatgtgggacatatacacaatggaatatcattcagccataaaaaggaatgagatcctgtcatttgcagcagcgtggatggcactggaggctgttatgttaagtggaataagccaagcacagaaagacaaatattgtatgttctcactcatatgtgggacctaaaaactggatctcatgaagatagggagtagattggtggttaccagaggctgggatggggaggaagagagggaacgaaaagaaagaatatgcatgtatttatttccagtgaactgtatgcttaaaaatggtaaagatggtaaattagatgtgtatattgtacttcaacaacagcaacttggatccaggattagtcccaaccccatgtgtcctccacagagtgggcctcttggtttgtggccctttttcttcttgagccctatacagctggcattggtggctctggggccactaaccgttcctgcccctgcccctccttgcctgagccttgattaacagctgagaggctgaagactgagcactggattgggagttcagcaacaaggattctagtcctggctctgcctgtcccaggtgtctccttaaaaagcggattgcacccttcatcacggaagcaagtatgcctgtggacttccatctcccttccagatagaacaaagtaggaattcaagccaaggaacaggagggcagctggagagaggaggacctgtggccaccgaagtctgtgagggatggaggagaaacagaggcctgcaggaaagtgtggggtgggtggctgcaaagataaggtccagaagaggactggctgtttgattttttattttacttttttttttttgagtcacagtttcactctgtcacccaggctggagtgcagtggcacaatcttggctcaccacaacctctacctctctgattgaaatgattcccctgcctcagcctcccaagtagctgggattacaggcaccggccaccatcaccatgcccggctaattcttttttttttcttttttttttttttttttttttgagatggagtctcgctctgtcgtcaggctggagtgcagtggcgcaattttggctcattgcaacctctgcctcccaggttcaagcaattctcctgccttagcctcccaagtagccggaactacaggcacgtgccaccatgcctggctaattttttgtatttttagtagagacgggttttcaccgtgttcgtcaggatggtcttgatctcctgatctcgtgatccacccgcctcagcctcccaaagttctaggattacaggcatgagccactgcgcccagccctaatttttgtattattagtagaggtggggtttcaccatgttggccaggctagtctcaaactcctgacctcaggtgatcagcctgcctcagcctcccaaagtgctgggattacaggtgtgagccaccacacctggcctattttacttttttgggatagtctctcgctctgttgcccaggctggagtgcagtggcgcgatcttggctcactgcaacctctacctcctgggctcaagaaatcctcccacctcagcctgggactacaggcatgcactatcacatctggctaacttttataatttgtgtagatatgtggtttcaccatgttgcccaggctggtctcaaactcctgggctcaagtgatccacccgcctgggcctcccaaagtgctgggattacaggtgtgagccactgcacctggtgcctagctgtttgatttttgttgtaagtcctaaggaagagaaaagagatttgctcgacaaaaacaaaaacaaaaacaaaacaaaacaaaaagctgtaattggacattggggaaaacttgagagcaatagtggcagtgagattgctggagtgggacagtgggtaatctgatttaggtgctcttctaattccacggttagaggaattccatatgatgtagcaaaaggggcccaggatttctcctgcctgtcatttgctcagtgatcccagataaattcacctcctgtttgaggccttctttttcccatctagaaaatctgtgggtaggctgggcacggtggctcacgcctgtaatcccagcactttgggagaccgaggcgggtagatcacctgaggtcaggagttcgagaccagcctgaccaacatggagaaaccccatctctactcaaaatacaaaaggtagcgcatgcctgtaatcccagctactcaggtggctgaggcaggagaatcgtttgaacctgggaggcagaggttgcagtgagctgagatttgggccattgcactccagcctgggcaacaacagcgaaactccgtctcaaaaaaaaataaaagaaaaaaaagaatgaaaatctgcgggcagacctggccagtctctgaggtctaactttctgtgacttctcccgagggtcttcaccaggccttccttccagagggtgaatgcgacacacgacccttgatcctgatgagcctgggaaatgagttgatacggataaggaaggaaatattttatgaactgattgacaatgatgacgagatgataaaaaagttgttaaagctcaatattgcattccccaggtcagtactggaaatgtgcgtaagtcccatcaggtgaaatgaacaatttttcacctgttattttagtaaaagaaggaaaaatataatacctgttgctgacaagggtgaaatgaaactgggagttgttggtacactctagataggctcaatccttttgataataattttagcattacatttcaagtgctataaaactgtcccaacactttgagacagagattcatctgtgaatttatagagccgaaatatggagaaagccctgcattaagatgttcattgcagggttgggtgcgatggctcacgcctataatcccagcactttgggaagctgaggcaggcagatcacttgaggtcaggagtttgagaccaacctggccaacatagtaaaaccccatctctactaaaaacccaaaattagccaggcgtggtggcacatgcctgtaatcccaactactcaggaggctgaggtaggagaatcgcttgaacccgggagacagaggttgcagtgagctgagatggcatcactgcactccagcctgggtaacagagtgaaactgtgtgttaaaaaataataaggctgagcgtggtggctcactcctgtaatcccagcactttgggaggccaaggcaagtggatcacctgaggtcaggagtttgagaccaggctggccaacatggtgaaaccctgcctctactaaaaatacaaaaattagccaggcatggtagtgggcctctgtaatcccagctactcgggaggctgatacaggagaatcacttgaacctgggaggcagagtttgaagtgagccaaaattacaccattgcactccagcctgggtggcagagcaagattccatctcaaaataataataataataggctggacgtggtggctcatgcctgtaatcccagcactttgggaggccgaggcaggtggattacctgaggtcaggagtttaagaccagctggccaacatggtgaaaccctgtctctagtaaacatagtctactaaacacaccaccgggtgtggtggcgggcacctttactcccagctactcaggaggctgaggcaggagagtcacttgaacccaggaggtgaaggttgcagtaagccaaggttgcacctttgcactccagcctgggcaacaagggcgaaatctgtctcaaacaaaaataataataataaaaaataaataagatgttcatagcagccatattcataatagaaaaacaatgacaacaacattgatgtgtgccacactaaggggatagtttataaaattgtggtatattctcttgatagaacataattgttttatttaaaaaatggtaagcttaatggctctgtaacagcagggtaaaatgggtgatataatgatactggaaaagggtggtacagaattgtacatgtgctatgactatgcctttataaaacacttacccgagagaaacctagaaggaaataagcaaaaatgacaatgcctatggtaagagtcgttttctctgggaggtgagactaaaggggactttctggttatatattcctctcatgttttattttatttttatttacttatttttttgaggcaggttctcactctgttccccaggctggagtgcagtggcacaatcatggctcactgtagccttgaccttctgggctcaagggatcctcccacctcagtctcctgagtagctggaactataaatgtacactacaatgctcagctaattgaaaatttttttgtagagatgggggtctcattacgttgcccaagctggtcttgaaccagtcctcctgccttggtcttccaaaatgctgagatttacttttataattattaaaaataaatatgtatcttgaaagattagataattttttttttactttttcatagtgtccaaattttctagagtgaatgttaatgcttttataatgggaacaaataacttttttaagtgtaaaaattaatttattgcccagaccagtggtctcaaaactgtttccatctcacactgctattactaaaaagtgttcaagcatgtactccctggtatgtatatgtaatataaataacatctgttaatttgtttttattatatccacatataatattactgtaccaatatatattataaacatataaaaattgatcttttaaaagaaaaagagaaagataaatataaatgaaatcctactattcacatactctagtggatcttgtacatctccctgggtgacatgtctctccaccccggctttgttttgtgtgtgtgtgtgagagatggggtctcactctgtcatccaggctggcatgctgtggctgaatctcaactcactgcaacctctgcctcccgggctcaagtgatcctcccacctcagcctccccagtagctgggacaacaggcaggcgccaccatgcctggctaatttttttgtattttttggtagagacggggttttgccatgttgcccaggctggtctcaaactcctgagctcaaaggatccacccaccttggcctcccaaagtgctgggattgcatgagccaccgcgcctggcctccacccccacttcgggaccaccaagctagactcccgcaagtcttatcacgggttcctccccttcagtctcctgcctgctggattctttctgcacactgtgttcttgttaaaaccctaatctagttgtgttaaactcctgcttgaaacctttcaatggtatctcactgcctataggataaagtccaaactcaatgctacctcaatgacccaccacagtctgacaccccactcaagtcccctccagcatctcctgccacctccaactcactccagcagcccaggcgggttgcctgctagatgctgcacataccttgcctttgccaatgctggcccttttgcctgaaatgctaaccccagtcctgcctccaccctttgtgataaattcctgctcattctctaagattcatcttctgcagcaaacctcctcagactaaccccagtttgggataagtaccccctttctgcacactcataatattctctacacagctctgtcattgaccgtatcgtgttgtcatacagttacctgtttgcacagctctttcccttccacctgattaagtgcttcaggaaggcaaggctgtgctttatccgcctttggtctctagcacctgtacagtgcccagcatgcagaaggtgcttaataaatgttgactaaatgtgatgggccatactcattgcagaagattgaaaaacactgaacagcaaaaaaagacaaaacccaaatcatttgcagtcttccagcaatcccagttagcatcttctgtatttccttttagtgttttattcacttcgtgaatatgtgccaaatatgcctttattgtcatactctgttttcataatggagctcatacttcttacacattttctttacttgcggtgatattgtggtcagatacggttttggcagcaggtgtgggaagcgagtgattccaatggtagagaaagggggtatgaaggcagacagagctgcaggtgattccagccctggccaataagcacacaaaaggctctgacgtgagatcttcatgaccttgagcagtgtgaggtcttcatgaccttctctaggcttttgactccaatcagcaaaacaagaaaattagagtagatcagtattttttaaagtatgaacatattccacaggagggttacaggatgattttaggtggctcacagattgacgtttttagttttaacatttatgtatttatttatgtgaattagaaaaagcagcatgactaacttactaactgtgtgatctgacagatcttgttgcttaagacaaagttaaagtaaatatttaagtaaaaggaactgaacagattgaaggaaaatcatttgtaatttttttttttttttttagacagagtcttgctttgtcacccaggctggagtgcagtggtgtgatcttggctcactgcaaactctgcctcctggcttcaagtgattcttctgcctcagcctcccaagtagatgggattacaggcgccgccaccacacctgactacttttagtagagatggggtttcaccatgttggccaggctggtctcgaactcccaacctgaggtgatccgcccacctcggcctcccaaagtgctgggattacaggtgtgagccaccgtgcccagcccggaaaatcattaataaatttaaagagcagatgatatgtagataaggccaacactggggcagtcttgtgagaaaaacaagctgaaaaatactggcggttccttctggttcaaggatgccacacttctctgattcctgggtattaccaatataggaaatggccatgtagacctgccactcaaaaaagggtttaaggagccttagctccttgcatattgcctggcacatgatggggatcagttaatatctgttgaatggaaattcataaaaggtttacatagagttgagtgggggcagatggaacattcagcatccgccctgctcagtcagcatttgcggccctcatctagaatgctgacccacagaattctgtcttattcattaatcgttgaactcatgcctttctagactgctaaaacaggcagaaaacatatccattatctagctcaaatccctcacgttttaaccgaagactctgagatcctgaagatcacagagccggtggcagaggtacctgtcctgtgaatagcgcaggctggttatcctgaaaatcacccctacagagcacagggcggcccatgtggggtagaatgcatggctgcatccacaagaaagtcaggaaatccccaaggccaaagtgaagaggatcacccaaaacagacagacagtatgaactaatgctggggattgcccaggagggcttaagggcgtcacgggctggttttttttgggacggagtctcactctgtcgcccaggctagagtgcagtctcgtgatctcaggtcactgcaatgtccccccactgggttcaagtgattcttgtggctcagcctcctgagtagctgggattacaggcgtgtgccaccacacctggctaatttttgtatttttagtagagacagggtttcaccatcttggccaggctagtctcaaactcctgatctgaagtcatccacccgcctggtctcctaaagtgctgggattacaggcatgagccaccgcacccagccatgggttgattttttaaagcctgaaaggacagatgcagctttcagttcaagtgagacaggggattggaactgagacccctgtgtgaagctgaggctaccctgttcagtgaaaaagtagactagaaatcaatgtgaccatcagcatcaggaagtgacatggagtcttgtctgtcctagcttagaatctaggttaaaaaaaaattatcccctaagaattagtcatcacatgctttccccctcctaggttttggtgaatcccttagcctcaccccaatttctatgtttctgaaatggagtggttgtgaaaattaaatgagttcacaaatgtaaagtgcttgacacatggtaagttctaagtctgagtgagatgttgttgttatttattatgtaagaaattgagagttaatggaactttttaagtgaggactacccagtagtgtgctcatggatgtttaacaaccagctctccaagatgccggaggaggaccctggcttgcagtgtttgctgatttccatagtgtaaatactcccaccatggccagtttcaaactaccaacctgctgccacaagcatggagttgagaagaggtgcacacggtcagctttcatgagcgggtggcagctggctttgtcatattgctgatgctacaggactagcttgtagccatgctgacctctgagttttttcttaagccaatctctatggatcaaagttgactttatctttgtcgatataatctggctggaagaatgaatgttctgacttgttaatgatgtattcagcttgtctgcttaggtaagagagtacaggtgagttagttgaagctttataccaccttgccttgctgtggtctcaggaggcctcagtccttcttccaccttcctcagccgcacttactatgaggtgagggggagggcagagccagaccaccatggccagtccaaggcagccaccagtctacctcctgtctctacagacctgcctgtgctggacatctcacgtaaaccgaatcatgtaatatgtatataccacactttatccatttatcaatataaaatgattaaggagctattttactttctaagttctgtgttctaagtctgtgaaatctggtgtgtattttacactcacagcacatctctatttcagactggctgcatttcaggtactcagtagctacaggtggcccattgctactacatgagacagcacaggcctaagggaagaaaactgtggaaagggaaagggtgcagaaggagagtctgggagggtcagagaagcagaatgaagcgccacatgcttagggaggggagagtggcaggaggcaaggctggaggggcgggactggcatgagaacctcggcttctgtgcctgccctttagtgatgaagatatgtgccagaagttcctccagcagaacagctggaatatctttcggaaggacctgttgcagctgctcgtggagccttgccaaagtcaactgttcactccaaaccggcccaagaagagagagatctacaaccctaagtctgtggtcctggatttgtgcagcatcaacaagacgactaaacctcgttatcctatttttatggcaccccagaaatacctccccccattgaggattgtccaagccatcaaagcacctcggtacaaaatccgagaactcttggcttagtgtaagagcacaggggtccttatttaggacaaataaaggatggtggattgggcgctgtgctttctgaatgaccaccatgggagctgtgggacttggaggaagggggcctggagggctgagctgtgggtccacagaggtgtttgggggacagcaatgggggcacagtctcccttgatgcttgagggctgggctgagtgaatggatggtcagaggctgtgtgtggacgggttaatcattgggcataggttcagggtaggagggtcttgtctgataagctggatgtgggggaggctcaaatcaaagtggtcaagactagggttgcaaatgccttccaaggccacacaggtcatctaaaggagggcagcagaagggctgggaaggcaacggggaatggtggagatgctggggcccactgtgtaagttccccatccagatggggcagctgccccttagcccagtcagttgctgccctgtcagaaaataattcgggcctcatatcgtcagtctgtagattcttcaagagaatcaagaaattcaatattttagatgattcctaccagtttttaaacatgagcaactaattcagattgttttcaaatagtgtcaaacaaaacacacatgggcctgcaggtggtgggctgggtccctgtcagagagtggaagtgaggctgcgactgattgggaggagggtacaggagccagagagacgctgatgggacagcatgacaggagcaggcatcaggtccaggatgaggagtgagtagctgtgatagaggaggtggagacaaggaggctgcagagtctgaacgaaagagggctcctcactctctctgctgggtctttaatctggagctgcccaacactgatctgggcctacaactcagggttcctgtctccagcagcctcagcaccacagaccaagctccagacacctctttcccttcgagaaccccataggttagcctgagagcactgaggagcctggcggaggccatggcggcacaggagcctgcccgcttccaagtcccccaccctgtccctggcaaggcatagactctgaggaatgcctgggcgttgagctgggcaccaggagctctggcagtcccaggtgtgcttgtgtctcactggaccctcttgagcactttgattcccttatctgtacctcagtttccccagtggtgaaatgagcaagttggacaagatcaatggctttcatgaatgggggtgatctagtttgaaaagcatattcaacattatagttttgtttgttgaatttattttttattttgagacagggtcttgctctgttgcccaggctgcagtgcagtggcacgatcatagctcactgcagcctcgaactcttgggctcaagcaatcctcctgccttagcctccaaagtagctgggagtacaggtatgcaccatcacgtagggctaattaaaaatttttttttgtagggacagggtcttactgaattgctcaggctggtctcaaactcctggcctaaagtgatcctctcaccttggcctcccaaagtgctgagatttcaggtatgagcctgatacgatttggctgtgtccccacccaaaatcttatcttgaattgtaataatccccatgtgtgaagggcaggaccgggtggagataattgaatcatgggggcagtttccccatactgttctcatgatagtgagtgagttctcacgagatctgatggttttataaggggctttccccttcgctcagctctcattctctctcctgctgccatgtgaagaaggatttgtttgtttccccttctgccacgattctaagtttcctgaggccttcccagccatgcgaaactgtgagtcaattaaacctcttttctttataaactacccagtctcaggtatgtctttattagcaatgtgaggacaaactcatacagagccactacactggaactctgttgaatttaaaagaaagccgttttcatattgcataccagaaaagaagtatgaaatttttctctctgaagggggtgtggacgtaaagggtaaagaagcagtggacttacagatcttcacttccctgatagctccagaatcaaggagtcagggatatctgcagcagtcctggaaaggttgactgtgacctacaaggacaaggggtcactgttttgggaccaagtaagttggggtgtctgaccatatttaggtatccttttgcatttagggctgtggctccaagatgatggtgtgggcttcttattcatccatttgaaatttatttatttatttatttatttttggagagagtcttgctttgtcgcccaggctggagcacagtggtgcaatctcagctcactgcaaccttccggattcaagcgattctcgtgtctcaggctctcaagtagctgggactacaggtgtgtgacatcaggcctggctacagacctggctaattttttgtatttttagtagagatggggttttgctgtgttgcccaggctagtctcaaactcctgagctcaggcaatccacctgtcttggtacttccaaagtgctaggattataggcgtgagccactgtgcccagccttgaaatttatttattgagcactgcagagagagtcaaaggttggataagatgcattttctgttgccttttattttcttggctaggggtcaccaaactccttttaaattttatgtttttaaatttatttttgagacagggtctgtctctgtcacccaggctagaatgcaatggcatgatcatagctcactacagcctcaaactcctgggctcaagcgatcatcctgcttcagcctcttaagtagctgggattacaggtgtgcactaccatgcccgactaattttttttttttttttttttttttttgtagaggcagggccttgctgttctgttcagattagtatcaaactcctggcctcaagtgatcctcctgcctcagcctcccaaaatgccaggattacaggtgtgaaccactatgcccagcccaaactctttatgtaaggggtcacatgttgagcacttattacgtgacagtcaccttgctgagcatctgactgtggagttcagtgacctgcaggctctgccacttaatggctgttgaggattaaaagaggtggtatgtgtataacaaggtggaagatttttttcaccaagatctctgggtcctgcttcctgggaaataagaaaatgcggccaggcacggtggctcacgcctgtaatcccagcactttgggaggccgaggtgggcggatcacgaggtcaggagatcaagaccatcctggctaacatggtgaaaccccgcctctactaaaaatacaaaaaattagctgggcgtggtggcgggcgcctgtagttccagctacttgggaggctgaggcaggagaatggcgtgaacctgggaggtggagcttgcactgatccgagattgcaccactgcactccagcctgggcgatgagtgagactccgtctcaaaaaaaaaaaaaagaaaaagaaaatgcttccagaataacaggcagaacatgttttttagggcagtaatgggtgagaaaatagcctggaagagcaactgaggatgagggtactgagaagggagagagactctgggctgggcttcaggaggtcttgaggggagctgaggaagagcaaagttcctgaagccactatgtgacaaaagaacttgagaaggagaaatgtctgaagaggacttcaaggagtcctctgtgcttttctgtgcattgagaatgtgtccctctttggcatttgtttgagaaaccaagtgaacatttgaatagaattatagaattaggcagtactgctgtctctttgaatccagtaaccaagcagggagtgggcagcaagagatgcttattatattcagcatatggtgtaaagtccctggcatggtaagtgctcagcactcgctaagtgtcattcacgtcttttagaccaaggtcaatttgatcatctagaaactctcttcccccttcagtggaataggaaactgagactttggaagtctgagccctcataatcagtgataaaggccatcactgagtggattggggtaggaggagcctgaatgacttctcgcctaacccccacactcttatctaggtgaaggagctcatgggaacatgaacgggcagcctctcaggggagagtggagacagggcagcaaaccataccaagcactgtgtggggggggtactgtttggaaaaagaatgagtgggacagtgaggggaatgtagggcagggggaggtgggacttgtgtgtgagcctagcttccaggctgtgagctgcagaatgagcgccggttctcaaggttccctttccccagcacacacacacacacatatacatacacacatatatacacacatacacatgcatacacacatatacacatacacatatacacacatacacatatatacacacatatacataaatacacatatacacacacgacacacatacacatacacacatacacatacacacatacatacatacacatgcaataacatgggatcagattcaggcaggatactgggtgtgctggctcacgcctgtaatcctagcactttgggaggctgaggcaggagttcaagaccagcctgggaaacatagtgagaccctgtcactacaaaaaatacaaaaattagccatccatggtggtgcatgcctgtagtccaagctacttaagggagctgaggtgggaggattacttgagccgaagaggtcaaggctgcagtgagccatgatcatgccactgtactccagcctgggtgacagagtgaaactctctctcaaaaaaaagggaaaagaaagaaaaaagaatcaggcagtgggcagtggaagacatgacatgagcatttacctgggagaggagttcactcagaaggagtaaatatgataccccctggcacaagtgtttggaacaaatgacattttcagtgctgcagaggtcctcactgccacctaggcacagatccaagggtcccggaagcccggggtgatctgccatgcctaagaagccagggagagggccccaggctcaggtatggagtacctggtgtgtgccaggcattatgtgaggcactctacagaggccatcacttactctgaaactatttcctggcagctaactggatggcagcatccatttgagagatgaggagcctgaggccccgaaggcaaagctcactcagctaccaggtggtggttccagaaaatccaggaaaaccacagcccagcaccctcctagttaatcagcattgaagtgtgtggacagttacaccaccgttactcatctatcccaaatgagccacctattttcaaaaaaggaagtctgcacacacagccctgaaactgtgctggggagaatataattgccctctggaattattttccatatgtaaataagcatagtcatacttagagaggcaagcccaagctgcttgagccaaaaatatagcccctagtgctaaaagcttccactgtttgggggaaaaataaaaaaaacccacttgaaaaataaacacaggacacattaccagcgtttgttataggtagtgtttaaggtcccaacttggggttggaagaaaggcattgtttaaatcttctattccggtggggcgcggtggctcatgcctgtaatcccagcactttgggaggctgaggtgggcggatcacaaggtcaggagtgcgagaccagcctggccaacatggtgaaaccgcatctctattaaaatataaaaaaaaattagctggtgtggtggcgggcacctgtaaccccagctactcgggggactgaggcaggagaatcgcttgaacccaggaggcagaggttgcagtgagccaagattgcgccactgcaccccagcctgggcgacaagagcaagactccatctcaaaaaaaaaaaaaaaaagaaaagaaaagaaaaaaaaaaagaaaaaagaaaagtcttctattcctttcatataactcctaggaaagtcttaccttccagttaaggggtgaaatgggtcactttgctcatctgcaaggctacatcatagggaaatactttcagggcagtacacgtacaggccattttaccatgatgcctttctactgctgggggatttatggggcttaactgcaagggtgctgagttgctgaatttgtaatcactggtccagagcaaacaatgaggatgagtagcagtttctaggtggctgataagcaggatcaaagcataaacaaaggtttttcatggctgctgccaaactgtgggccttggggacagacactggagggctggggcagtgagaggtagcagagttcagatgtgtgctgtgtgactctccgccaggctccatccctttcctgagcttcatgcctagcatctgtgcaattccaggggtccagcgggtgttctgcacacatagcccccaccccaggggctgagcagggccccacccgcctctcttgttttgtcctcacctatctcgtacttccaaaaccacccacccccaacagaaagtcaggatcaagaaagtggattattgaggctgggcgcagtgcttatgcctgtaatcccagcactttgggaggccgaggtgtgcagatcacctgaggtcgggagttcaaggccagcctgaccaacatggagaaaccctgtctctactaaaaatacaaaaattaaccgggcgtggtggcacatgcctgtaatcccagctactcgggaggctgaggcaggagaatcacttgaacccgggaggtggaggttgtggtgagtcgagattgtgccattgcactacagcctgggcaacaagagccaaactccgtctcaaaaaaaaaaaaaaagaaaaagaaaatggattattgaaccccatggtggcatgtgaaaatgaactgtgggagagataatagtatttatttatttatttgttatgttttcccagatagggtctcactctgtctactctggagtgcagtggtgcaatcacggttcattgcagccttgacctcctgggcttaagggatccttccacttcagtctcctgagtagctgggactacaggtgtgccacaatgcctggctaatttatttttttattatttgtagagacagggtttcaccatgttgcccaggctggtcttgaactcctgggctcaagagatctgcctgcttcagcctcccaaagtgttggaattacaggtgtgagccaccatatctggccgtaattgtatttcttgctgtctgtaattgtactgttacgtaagagactctccttgtacttaggaaatatacactgcagtacttggcagttaagagagataatttcttcaatttactttccaaattatttagaaaattataatatgtacatttagagagagaatggcaaagaaaatatagtcaaataacaactggccagtctgcgtgaagtgtacttaggaattgtttttaaaaaaaatttttttttaacagaggtggggtctcactgttttgctcaggcctgtctcaaactcctgggctcaagtgatcctcctgcctcagcctctttttttttttttttttttttttttttgagacagagtttcactcttgttgccaagactagagtgcagtggcagatcttggctcactgcagcctctgcctcctgggttcaagagcttctcctgcctcagcctcccgagtacctggaattacaggcatatgccaccacgcctggctaattttgtatttttagtagagatggggtttcaccatgttggtcaggctagtcttgaactcctgacctcaggtgatcgaaccacgttggcctcccaaagtgctgggattgcaggtgtgagccaccgtgcccagccactgcctcagcctcttaaagtgctgtaagccgtcgcctggccttaggagttctttgaaccatccttgaaattaaaaacatatgtttaactgtggtaaaatacgaatagcataacatgtatcatcttcatcatttttaagtgtatagttgagtggcatgaagtattctcattgttatgtaactatcaccaccatccatctccagaactcttttcatcttggaaaaatgaaactctgtacccattaaacaatgactccccattactccttcccccctagtccctggcaactacctctctcctttctgtctctatgaatttgagtaccctaggtacctaaagtagtggaatcatacaatatttgtctttctggggctggttcatttacttagcatgctgtcctcaaggttcacctatgttgtagcatgtgtcagaatttcgttcctttttaaggctaaacaatattccattttatgtgtatataccatattttgtttacccattcatctaccgatggccacttgggttgcttctactttttggctattgtgaataatgttgttatgaacattggtgcaaatgcatctttgagaccactgctttcagttcttttggttatatatccaaaagtgggattgctagatcctatggtaattccatttttaattttttgaggaactgccatatttttcatagtggcattatcattcttgcaattttaagtgtgaagttatcttaaaataaaaattagaactgaaaaaaggaagaaagtgaaggaagctaatatggatatgcataaatattggctttagttgactttataattagataaaaattgatttttaagtttgttgaggccgggtgtggtggctcacacctgtaatcccagcactttgagaggctgaggcgagcagactgcttgagttcgaagttcaagaccagcctgggcaacatgatgaaaccctgtctctacaaagaaatacaaaaattagccagatgtggtggtgtgcacctgtagtcccagctactcaagaggctgaggagggaggatcacttgagcctgggaggtggaggttacagtgagctgagattgcagtgagcctgggtgacagagccagacccagtctcaaataaaaaaaaaatcattgataagctccgtgatattcaggataaaaagagaaacatattatttattagaaattagacaattgggccaggtgctttggctcacgcctgtaatcccagcactttgggaggccaaggtgggtggatcacgaggtcaggagatcgagaccatcctggctaacacggtgaaaccctgtctctactaaaaatacaaaaaattagccgggtgtggtggcgggtgcctgtagtcccaggtactctggaggctgaggcaggagaatggcacgaacccgggaggcggagcttgcagtgagcagagatcgcgccactgcactccagcctgggtgacagagcgagactccatctcaaaaaacaataacaacaacaaaaagaaattagacaattgagaccaagaagaaaatggaggaagtcactatggatttgtataagctctagccataattacaaaacctggctttcacacacctattagaatagccaaaatccagaacactgacaccaccaaatgctggcaaagatgtggaccaagaaccatcattcattgctggtgggagtacaaaatggtacagttgctttggaagacagttcagtggtttcttataaaattaaacattctcctaccacacaaggagttgaaagcatatccatatgaaaacccgtacataaatgtttatggcaactttatttgtagttgctaagacttggaagcaaccaagatgtctttcagtaggtgaatggataaataaactgtggtatgtccagacaatgggatattattcagcactaaaaagaaatgagctatcaactcttgaaaagacatggagcaaccttaaatgcatattactaagtgaaataagccaatctgaaaaggctacaaactggatgtatgtccagttatatgacactatggaaaggcaaaaactatggagttgtcttcaaaattagtcgttgccaagggctgaggagagggaaggatgaatggatatagcacagatgatttttacagaagtgaaactacaccctgtaatactactactaatggtaaacccatgtcatcatacatttgtccaaatccatagaatgtaaacttcccagagtgaaccctggtgtaaactctgaccctgggtgataacaatgtgtcagtattggttcctcaattgtaacaaatgtaccactctggtcgcggacattgataatcagggggctgtgcatgtgtcgggaacagggagtatatgagaaatccctgtactttccactcagttttgctatgaacctaaaactgcgatagaaaatagagcctgttaaaaaaacaaaacaaaacaactggctttgagctctctgatggctcaacatggtgaaaccctgtctctactaaaatacaaaaattagccgggcatgatggcaggtgcctgtaatcccagctattcaggaggctgagacaggagaatcgcttgaacctgggaggtggaggttgcagtgggccgagatcgtgccattgcactccagcctaggtgacagacagagggagactctgtctcaaaaaacaaacaaacaaaaaacagttctcaccagcattcacacattgctccattatccacatcctcatcagcttcgatgatcatcagctcatggggtttgccccctctgcgagaagcatcctggagcccattggctgctacctgctcccctccctccaaacagcgcttgtcttctgtccatctcagtcccctcaccttcaggctcctgggcatctccatgaaacagggaggcctaggagagctggcatcactgaatctaaaacctagaagaatccaaccagcacacatgccctagggagaggagatggtctaggtttagagagacagcaccaaacaagatggaacaaagtccctggcctctaggagcttatgttctgtattgatgatgagcacaggaagtgcacaagaaaaatcagggtaggtagggggtggaggctactactttgtgaagggtcattagagaacactttatgaagaatatgacattggtgagtacaccagtgagggagtgaaccctgcagatatcaaggccaagaatgttccgggcagaggaatgttccatgcttggcatggctaggtgacagcaaggaggccagtatgtccagaatggagtcaaaggagaaaaaagttgcaagaaggggggtggaggccagatcatgaccatgtgaagggagcttttggaaggttcttagcagagatctaggatctagaatctggctagactggggaagcaccagcatggaaggcgtcggggaggaaggcactgcagtgatccaagtaggagattatggaggcttggatcagagtggttgtggtggtgttgagatgggaccaatcctggccatattttgacggcagaactgagagggcttgctgttggactcaatgtgaggaatgggagagaatcaagaattactccagaaatgttttttgagcaagtggaagctgcttcctgagataaggaaggctgtgagggaagcacagttgggggtggatctcaggagtgtggttttaaacagtttacagcaaaaggatttaaagatgaagtgacctaatatacattaaaaacttaggacaggacaggcacggtggctcatgcctgtaatcccagcactttgggaggccgaggcaggtggatcatgaggtcaggagttcgagaccagtctggccaacatggtgaaaccctgtctctactacaaatacaaaaattagctgggcttggtggcgggcacctttaatcccagttactcaggaggctgaggcaggagagtcacttgaacccgggaggtggaggttgcagtgagctgagatcacaccattgcactccagactggacaacagagaatagagtgagactctgtcaaaacaaacaaacaaacaaacaaacaaaaccttagggacagtatttggtacttcatagcacacatgcatgtaaggttgacatttatctccattttaaaaataagattgaagtttcaagggttaagcaacttatgtactgtatctctttgagaccctgctttcagtccttttggatatgcagttgaaccttgaacaacatgagtttgaactgtgtggccccacttatatgtggcttttttttcagtcaaatgcagtggtgggatgccaaactgcagacagggagagccaacttttcatatatacaggttctgtagcaggacttgagtatgtacggatttgggtatacccagggattctggagccaatcccccagtatatcaaggtatgacttgaaagtggcattgctggatcatacggtagttctatttttaattttttgaggaactgtcctactgttttccattgcagttgcaccattttacaattccactaacagtgcataggggtcccagtttattcacatccttgccaacacttgtttttatttttgttttctttttttctttgtttttttttttttttttttttttttgagacagggtcttgttctgttgcccaggctggagtacagtggcatgatctcagctcactgaaacctctgcctcctgggttcaagcaattcttgtgcctcagcctccctagtagctgagattacaggcgcccaccaccacacctggctaatttttgtatttttagtagagatggggtttcaccatgttggccaggctggtcttgaactcctcacctcaaatgattcgcctgcctcagcctcccaaagtgttgggattacaggtctgagccactgtgcccggcctgatttttgttttctagaaagtctcactctattgcccaggatgaagtagagttttgacctcctcggttcaagtgatcctcccaccaaagcctccagaatagctgggaatacaggccatttctttatttctatcagaattggactcatggcttcctgttttattcagtgtgctatcatttgcattatatgagtcattctacattttgatgctcaaattgtgacagatttggccaatggaagccacttcaagctggcttctgtgtccttttgatatgtccccgtcattcttggagcactgtcttgattcctgccataacaggatatttcaagatgatcttgtactttctttgctgcagccctggaattagccatttctccaaggcccatggttccttttagtaaagaaccatgtttagaagcttctggccctggctttacccccgatgaaactcatggctttgaaaggcccagcatctgatctgaagaggcagaacaaaccattcattttactgaggagactgaggcctagatgtggtccattggccaagtccgcagccagtgacagagcttagacacgagctgaggcccctgacctcctgtccagtgttctctgcatggcaatacatattgctagctaagcggtctgctcccagcagggcctggccctctctggacctcacttccctcttgcggccactgagggttatctttgccctgggggtccaggactgcctgagagttgaccttagctcctggctcttgatgcgccttaccttcctggagacttttatgggtgaatccaccttaaattacagaagaggtcctgcttcagcttttatctccagcttacaaaccaatcccatcctgaaatgacttgtcgaagtgcatggacctggggggacacgtggtttgttccctccacgccagggattcaaggaatatgtgcctccctgaagcccatcttggtcagctaagacctgtctcatagaggagcatcaacaggaaagattgggtccaggcctgataccgggttgggaaggcaattggaaaggcctcgtctacctgccctaaggctcccaacccacccaggttacaccatcagcatctggggaaacagagacactaccgtcccacatccggaggccagtgtctcattagcctcacgtcaaagttgagaataagaaccctctatagtcatattctctatatgccattagagaatgtttgctgtgcctgatttggggataggttatgctgcatctgaccgatgccctctggtttggtcagccacgatagcaacttccagcctggaaatgcttgattattcaatcagtgcccttactagtgatgtcacaccaagcagcagtctgaaaggctttcgtctgttgtattcaacagacatttccaagcacctgctgtgtgtcaggcattacgttgcaccgttgttgcagaaattatttaaaccttagctcaatccaagtaggctttcaggtaacaattacgatgcaagtgggctccatccatatacaagaggaacaaggaggggcagcaaaagaaaggccgtatcggccgggggtggtggctcacgcctgtaatcccagcactttgggaggctgaggcgggcggatcacttgaggtcagtttgagactagcctggccaacatggtgaaaccccgtctctactaaaaatacaaaaaattagctgggcgtggtggcgcatgcttgtaatcccagctacttgggaggcagaggttgcagtgagcaaagatggcaccaccacactccagcctgagtgacatagtgagacgccatctcaaaaaaaaggccgtatcttctgacgttcagttctggcactcgggagtgtcaggttcttacaggcaagactttgtggagatactgaatttaagttgggctctgaagaatgattttgccaagtgaaactgtggaaagggcattacaggcagaaggaatggcttgagcaaaccacagaacctgtaaagtgcaaggttatcctgaacagcagagcacctgggtggcagtggctaacacccaggcaatggagggaggagtcaaagatgagaaattccagatacctcagagcccaagcatgaaggagcatgaacctgtgcttctgtagcgtatactaactctattctacaagcaacgagggcttaatacaggcttttaaaataacctttattttttaaaagttagtatgtgcattataggaaattgaaaaacacaagcaaagaacaaagtcattcacaatcacaagcagtttatagtttgacatattcttctagatcctgtgtgtaggcacaacatccaattttatgggactgagactgtacagtatgtatcatgatttttcacacatcatgaatatttaccaattcaaaatcccaaagctatatgagtattctgataaccaagaatacactacaccaactcaaactgctaaaaaaaaaaaaaaagatgtaatcctgcctttcttgggacagaaatttcatataagacaaaaatggcaacacgcctctagataaaagcattggcagagttctgatttaaatgctgcattcccttaatgctcaatttaaaatgaaacacacagcaacagaatacagtatgtttttaagagaattcattagcagatctataccattaaaatattagcaaagtgtatttccattgaattaatgtgttcttatagtacagccaagagatgcatacatcaatggctatcaaaatgtaaatatggacatatatggacacatctgcatacatctctacctgtataattccttctgcccctctgctgccaacctaatgaacaagtcctgacatacactgctcagaggtggcttaacaattccatgtccaagatgtatcctatcaattataacaaaggtatttacaaataggctaattcactagctctagtttttatcataagttgtcaccccattcgtaaagcttagatgttgcaaaataataactttgtccacaatgaacacaggcactttactaaaaacgctcttgtagacctgtggttatcatctaaaaccatcgtctagatatggagatactagcaaagagcccttcccttcacccttcctcttctccctcttccaccatccccgtgactaagtacaggatgtctagctccaaggggtggactaataaaggtcactcccagaggacaggccttcctaaaaactaacaaaaggacattcacaaagggactgatttactacatctatttttaacatactttgagcattaagacttatcctttaatacacaatattaactaaaatgcacatatagaacaatggttagaccatctgaactaatctcaggagcacagaacccctctccctgcatacctcctctgcccacccccccttcccccaccccaaacacccaatgaatagtctgcattcgctcctaagcatcaagttttaacaattccattcccaaatgcaaccactcctaggaagtactgaaaacaaatgcttagaggggtgttacttaagccctctactgttaacctacattgtgcacttttttttttgaaacggagcctcgctctgtcgccaggctggagtgcagtggtgcgatcttggctcactgcaacttccgcctcccaagttcaagcgattctcctgcctcagcctctcgagtaactggggctacaggtgggcaccaccacgaccagctaatttttgtatttttagtaaagatggggtttcaccatgttggccaagatggtcctgatctcttgacctcgtgatccgcctgcctcggcctcccaaagtgctgggattacaggcatgcgccactgcgacaggccgttgtacacttttaaacacctagaaagactagatgtttcaaactggacttaagttttccattatatacacagtagcattgaataaatggtatacatacataacacagactgtaatttgagtgtcttctaaataggaacattctggcctagaacccttccctttcccacctctaccaaccccgtggacagctataagccatctgtaatgcttagggggggttttaacaatttcacttgtttttaagaagtcttccctatgaattttaacacaaagtgtactcaatgtagtagtttactaattctacttttgtcatatactggcaacctttttaacatcgactagacgtaaattaggactcctatgtccgcttatatacactatatacacagcacagtaaatgaaaatgcagacataagggacaatggtcaatgtgcctcctcataaacacactggacactggtagaaagccctttgcactttgtgctcctccttccccctgaaccagcacaaatatcaaaatgggtactgctcagagaattgatcaatttccaagacaatatttcatatcaaaaggatagctacaaaatgtgttatttactacctctacttttaacatactttgtgcacttctaaacatctagaaagactagatgtttcaaataaggacttaagtttgtccgctatatacacagtagggttgaataaactacacacatgtaacaatggttatatctgatagtgtcttctaaatacgaacattctggtctagaacccttcattccttccaactcctctccaccaccaacctgatggatataggcacgtgtcacttagagctgatgttatctcacttccaaaagtccttttcagaagacagcctttctacaaattttaacaaagtgtacaaaatgtgttagtttactaactctacttctgtcatacattggcaacctctttaatatctagagactagatattataaaatcgggactaatttgtccgttatatatacaatatatacagtatagcaaagttaaatgaaatgcatgtaacatatacacaatggattaagctgaaattttctaataaacaatggcaaaacaccatttgcaatttcttccctcccacctcccaggtggttcaacaattccacttccaaacagcatttcccatcagtttttaaaagctatttacaaagtgttattctactaccacttttaaatacatcaagcacttccaaatatctagaaagactagatatttcatataacttgtccaccacatacacagcactgttaaataaaattgcacacacataacaatggttatcatctgaggtatcttctaaatgtggccattttggccttgaatcattccctcctcccttccttctctgccttcaatccagtggacaagtacaggcacgtgtaatgcttagagatggtcaaacaaattcctatgcaaaagtctttacagaagacaagttttcctacgaatttcaacacaaagtgtacaaaatatgctaattttactcctttgtcatacactggcaacctctttaacatctagagactagatgttgaaaaattaggactatttgtccattatatatactatatacagagcaaaacaaaatgcacaaaacatatagaaaaatggtgtctgaaaatgtccaagtatgaacacactagtaatattaccttttgcaatttcttccctcctacctcctctaaactattgaacaagtatagacattactatactgttcacaaaggtggcttcacaattcaatttccaaaagcatttcctatgaattttagcaaaaagatatttacaaagtggtattttactacctatacatttaacatacatcgggcacttctaaacatctagatagactagatgtttcaagtaaggagttaatttgtctactatgtatacagcagtcttgaataaactgcaaacatgtaacaacagttataatttgaaagagtcttccaaatgtgaacattctggcctagaacccttcccatctccatcaacccagaagacatcaaattttcagaagacaatctttcctaggacttgtaaaacaaaatgtacaaaatatattagtttactaactctacttttgtcatacactggcaacctctttaacatccagaaagactagatgttgtcaattaggactcgtctgtcctttatgtacactatatacacagataagtaaaacaaaatgcacagacataatgattcatcttgcctcgctgtaaacaggatggcatagagctctctgcacctccccctcctctctcctcccctgaaccactgcacaaacacaatgagtattactcaacaggtgatttggccattcccccccaaaaatatttcctatgaattgtaacaaaaaggtatttacaaaatgtgattttgctacctctaattttaacatatcaggcacttcagaacatctaaaaagaagagacatttcaaaaaagcttagcattgtcaactatatacacagtagtgaggaataaaatgcacacaaaacaatggatagaatatgaaaatgtcttctaaatatgaccagtctagcatagaaccttcttctcttccttctcaggtcttccagctccatgtcatctaacccacttaacaaacgtggacgtatcgcttccagaggccgtcttaacaactccatttccaaaagtcatctccagaagacatgtattttctatgatttcttttaaacaaatgagaatttacaagatgtgtaactttctaactctattttatcatacgtcggcaacctctttccatctagaagggctagatgtgacaaatgttttctattaaaaggttggggtggagttgagagcagctttttcatattatatacacaggccttccataaacggccagtaaatcttcccagagggtggtgggcatttccaacgggccaaacgtggcctgtcattctaccatttctctcttccgacagcaaagtctggtagaatgaagaccaaccgcccgatggccgctaaccgttccacccgtcgtcgttcgggacttcgctcaccttccaggccccttaaggcctttgtccgttgtcgtcaggactaggtaggtctcgcccaatggcgacagagtggtcacccgggaaccggatctgcgcggctccgtggcctaaagaggcggccgagcctgcttgcgtccctaggccgccttcccgggccgtccacgccttaatggcctccgccgcgcggcgttcgagctgccgccatacttcccggcccaccacgcccagcgccgcccaaaggcgctgcgtcccggcggctctgcgggggtttcgtcgaggcttgggtcgggagacccgggtgccggcggggtccgggctgggagacgccacggccgccattagtcaccgaggtggggtgggaaagagaggttcgctgcggcttcaaggtctgggcacagccagtgggcgggcacagccagtgggcagccacagcagaggcctccgttatctgcagggcagagggctcggcctgtcccggggccccccagttcacccgccggcccggggccggagggcctggagggccctggaggagcgggctgcgttctgcgtctctccgcgatctctgccggaccggaactgacttggcagttctctgcgctggcaagagaggagcggtaccggaagtgcccttgcgctgggggcccgcgagccgtggttccgggtctgcaatgttccggcgtgggggtggggaatggggaatggggtgtggtcacgtggggttagggccccctccaccccgcttgctcttcgcaacggaaattgctactggcctcagaattccctgagcaaacgttgcttctctatctccttactcctccggtgctggataagaagactccaatatttcatttattgactcatttaccacctgtttaccgagcacctatgtgcctctaagcacgggggagtgcagcagtaaagaaaaaaacacaggaaaatttctgctctcctaaaatttacattctagtaagggaaacaacaataaacaagatccttaaaatgcataaaagggtagatagcgaaagtgctttggaaacataaaaaggaaagaggaatatgaagtgcaggtgcggaatgctttatagtacggccaggtgactctggagcagagacccgaaggaggcgaggggatgagccatgcttggagatgtctgtaggggaacagcttatgcacaggccacaaagccgaagcatgtgggccaggcctgttccaggaacagcaaagaggctggggaagagaggagagaaatgggaccatgggagggagttgaactgcagtgcgggagagctgaagtggaggcaggggcagaagcagggagacctgataactgactgttgcaatcaagcaggtgagctatgatagggacttatgccagggcgacgacagcaaagggggcaaaaagtggttgaattcaggggttgacataagctcaagtctataagatttgctgacggaccagatgtgaagtgggagagcgagaactgaaagatgactccacactttttggcctgagcaaatgaaaaggcagccgccttaagtgagatggaagaaaccatgggaggagcaagctttggggagaacaccaggagctgagttttaggcatgttaagtttgagatgtctgtttgacattcaagtggaaatgtcaagcagacagatggatttatgagtctggcattcagggaaaggtttgaactggagatgaatctttgggagtcgtcagcatatagatgtctttaaaaccttgaggctgcatgagagaaccaagagagggacaaggtctgaggtctgatccctgggtaacgtttacaggtcagggaatgagaaggaaccagcaaaggagactgagaagcgaccagggtggtaggagaacaaccaggagagtgtggtgtcctggaagtaaatgaggaaagtgtttcaaggggaatttatcaacagtgtcaaatgctgctgatgtgtcaattaagataaggttggaaatgacacttccagcttttagaattaatgctgtgatgaacttcctcgtgaattttcacattttgtgtagacttctgaattcctttgggtttttttgttttttgttttagatggagtcttgcgctgtcacctagtctagagtgcagtggcgcgatcttggctcactacaacctccacctcccaggttgaagtgattctcctacctcagcctcacgagtagctgggattataggcgcccgccaccgcgcccagctaatttttgtatttttgagtagagacgggggtttcaccatgttggccaggctggtctcgaacttctgacctcgtgatccacctgccttggcctcccaaagtgctgggattacaggcgtgagccaccgcccccagcctctgagttcctttgtttgtatttgtatttttattttttttttttgaggcagagtcttgctctgttgcccaggctgtagtgaaatggtgcgatcttgactcactgcaacctccacctcctgggttcaagtgattctcctgcctcagcctcccaagtagctgggattacaggcactcgccaccaggccaggctaattttttgtatttttagtagagacggggttttaccctgttggtcaggctggtctcgaacttgtgacctcaggtgatccacccaccttcgcctcccaaagtgctgggattacaggtgtgagccaccgcacctggcctgcatttttattatttttaaaattatttatttatttatttatgtttgagacagggtctcgctctgtcatccaggctggagtgcagtggtgccatctcggcccactgcaacctccaactcctgagttcaaatgattctcctgcttcagcctcccaagtagctgggactacaaacgtgtgccaccatgcccagctaatttttgtatttttagtatagatgagatttcactgtgttggccaggctggtttcaaactcctgacctcaggtgatccacctgcctcggcttcccaaagtgctgggagtacaagcatgagctaccaccactggccctgagttcctttggatacaattctggaaatgtaaagaaagatcaaaggattaagactcttgatgcagactcagacatgattcccaggaggaaaatcctgcagtcagaaaggccttgctggtggaaggtggacaggagaggtggcgagaagtccaggggctctagtccacaatgagatgacaaggccctgagccaggagagttgcacagaagtagaaaaccggtgaagtgagtgtttctagcatttcaagagaagaagccagtgggctgaatacctgagagaagagggaggaggggaaggaagagccatggattatacaagtttcaaacactagcgctaatgggtagtttggtagttgatacattagccaagacaaggagtaggagaggctcctggtcccctttctgagcttcccaccgcctaagcagccaaacatgtgggtattcctggaacctaaagatgaggatgatgaaaaacatgtatacatcctgctttctttttctttttcttttattattttttttccgagacgcagtcttgctgtgtctgggctggagtgaagtggtgtgatctcggctccctgcaaccctcgcctcccaggttcaagcgattctcctgactcagcctcctgagtaactgggattacaggcacgtgccaccacatccctttaatttttgtattcttagtagggatgggatttcaccatgttggccaggctggtctggaactcttgacctcatgatccgcccacctcggcctcccaaagtgctgagattacaggcatgagccactgtgctcagcatacattctgctttctacctgatagctctacttgaatgttccaacagtatctgaaactcctcttgtgcaaaacaaaactcttggtatctccccagagcctgctcttccctatcagtaaatggcagtatcatccacctgtttcccaagtaatatggtttggctgtgtctccatccaaatctcatcttgaattgtactcctataattcccacacgttatgggagggacccagtgggagataatttgagtcatggggtggttccctcatactgttctcatggtagtgaataagtctcatgagatctgatggttttatcaggggtttccgcttttgcatctttctcattttctcttgctgctgctgtgtaagaagtgcctttcacctcctgccatgattctgagacctccccagccatgtggaaatgtaagtccgattaaacctctttttcttcccagactcgggtatgtctttatcagcagcgtgaaaatggactaatacaccaagtaattctcgatctcccttgattccccattctctcacttcccacacggcaaccatccccagtcctatctgcctcctaaatatatttcaaatacagccaattccctgtgctgtccattatagtagccactagctacgtgtgcctatttaaattgtaattcattagaatgacatgaaattaaaaattcagttcttcagccacaccaccctcattccaagtgctcaagagtcacagggaactaggagccagtggctaccatatgagcacaggtggagaatgttcccaccatcccaggaagtcccattgacagtgctgatctgtatccaaatccaagctagcaacgtctttcatttggatgactctaatagccccttaattgttgttgttctggtttctactgctctccctttctaatccgttctccctacagaagccagaatgaacttttaatcaaaaatcagatcttataactctcctgtttaagccttcagtggcttttcatcacacttagaacaaaatcaaacttatttccacgaccactgccttccatgacctgccctttgacctgccctttgtgtccctcgtgcctcatctttgtttttttttttgtttttgtttgagaaggatctcaatctgtcacccaggctgcagtgcagtgcagtgcagtggtgtgattatggctcactacagcctcgtcctccctgggctcaggtgatcctcctgcctcagactcccaagtagctaggactatagacacacgccaccatgcccagctaatttttatatttcttgtagagagagggttttgccatgttgcccaggctggtcttgaactgagctcaagccatccaccctccccagcccgtcccggcctcccaaagtgctgggactttaggcattagccactgcccccagcttcatgccccatcttgagccactctctccctgtctcgttatatgccagccacgctagtctccttgctgttccttccactctctgagctcttctctgcctcagggcctttccacatgctgtctacctggaagactcttcacctcttcactgggtttggcaaggctaagtttcttctcatcctataggtctcagctccaatgttatctctttagacagcctttcctggccgccctttctccaggcggtctcttccagttatcatcacattgccctacttatttccttccttcatttttcaaaaatctcattattttattaatagtaatgaacatttctgcacatttcttatatgcaaggcactgtactgaggacttggctttatatgcctcactatatttatttatttattttgagatggagtcccactctgtcacctaggctggagtgcagtggtgtaatctcagctcactgcaagctccgcctcctgggttcaagcgattctcctgcctcagcctccctagtgtctgggattacaggcatgcaccaccacgcctggctaatttttgtatttttagtagagatgaggttatgccatgttggccaggctggtcttgaactcctgacctcaagtgatcctcctgccttggccccccaaagtgctgggattacaggtgtgagctgccacagctggcctgctttgtctatttttaatttaattaatttaattttgagacagggtttcaccctctcacccaggctggagtgcagtgatacgatcgtaactctccacagcctcgaattcctgagctcaagagatcctccttctccagcctctggagtacctgggactacaggagtgcatctccacaccctggctaattaaaaaaaaaaaaaaagtttttttttgttgttgagacagagtttcactttgttgcccaggctggtcttgaacacctggctctaagcaatcctcccacctcagcctcccaaagtgctgggattacaagcatgagccaccatgccctgcctatctattaatttactagtttattttctgttctggttttcacctatgtccctggcactcagcacagtgcctggtatgcagtaggcattaataattgtaaagaaattaattaattgagcacatactgtgggccaagcactgtgctcagcactgtacatatattgtctcatttaacctgcacagcaatcctgtgaagtaagtgctactactctcctccttttacagaggagaagctatgtcacttgtctagttctcagaaaaaaactaggattttaatccaactcatctgactcccaagctccctgggaaggcactataggggatttagaagtctgagtacacacagcctgaaaccacccacagctcagactagcagcagggaaactaaagtattcctttcttgaagggctttctatttcagatcaggccacagattctggtgtgtcactgctcaatcaggaggcagattcaggacctgggtcagggcttaggcttggacagagtcaagaaagctaaatggctgggtgccgtggctcatgcctgtaatcccagcactttgggaggcggaggagggcagattgcttgaggccaggagtttgagaccagccagaccaacatggcaaaacctcgtctctactaaaaatacaaaaatgaagctgggcacagtggtacacgcctgtaatcagcactttgggaggccaaggcaggcagatcacctaaggtcaacagttcgagaccagcctggtcaacacagtgaaaccccatctctactaaaaatacaaaaattagcctggaatggtggctggcgcttgtaatcctagctactcgggaggctgaggcaggagaattgcttgagcctgggaagcggaggttgtagtgagccaagatcacgccactgcattccagcctgggcactgagcgagactctgtttcaaaaaaaaaaaaaaaaacacccaaaacaaaaacaaaaatgagccagtgtgatggtgtacgcctgtaatcccagctacttggaaggctgaggcaggagaatcacttgaacctgggaggcggaggctgcggtgagctgcaatcgcatcactgcactccagcctgggcaatagagggagattctgtctcaataataataataataataatggctgggcatggtggctcatgcctgtaatcccagcattttgggaggctgaggcgggtggatcacctgaggtcaggagtttgagacttgggaaacaaaggcagtgcaacatctgtaccttcccgggcctgggcatacagtcccaccattattgctattagcatttgtctgcactgaggcagatctaattgtcatcagggctctggaaaacaggtggtgttgggggggtgtcccataaagtccacttaggatcatcattatttttttattttttattttttttgagatggagtcttgctctgttgcccaggctggagttcagtggctcgatctcagctcacagcaagctccgcctcccgggttcatgccattctcctgcctcagcctcctgagtagctgggactgcaggtgcctgccaccacacccggctaattttttgtatttttagtagagacggggtttcaccgtgttagccaggatggtctcaatctcctgacctcatgatccgcccgcctcggcctcccaaagtgctgggattacaggcatgagccaccgcgcccagccaggatcatcattattatcattgcttgaacgtgggatttggttttgccctactacagtttctcaaacttgaatcgtttctaaatcagcctaacaactttttccatatccatgtaccacaatgtgtcagtccattcaggcggttagaacaaaataccatcaattgagtggcttataaacaacagtaatttatttcttacagttctggaggctgggaagtctaagatcaaggaaatggcagattctgtgtctggcgaaggcccagtttttttttttttttttttttttttttttttttttttttttgagacggagtcttgctctgccacccaggcaggagtgcagtggcacgatctcagctcattgcaacctctgcctcttgggttcaagcaattctcctgcctcagcctcctgagtagctgggatcacaggtgcctgccaccatgcccagctaatttttgtatttttagtagagacagggtttatttctttctttttctttctttctttttttttttttttttgagatggagtttcgctcttcttgcccagactggagtggaatggcgcgatctgggctcactgcaacctctgcctcccaggttcaagcgattctcctgcctcagcttcccgagtagctgggattacaggctcctgccaccatgcctgctaatttttgcatttttagtagagacggtattccaccatgttggccaggctggtcctgaactcccaacctcaggtgatccgcccaccttggcctcccaaagtgttggaattacaggcgtgagccaccgtgcctggcccggcctcttttataacattgatcccattcatgaaggctcttctcccacgatctaatcacttcctaagggccccacctcttaataccatcactgtgggggttaggatttcaacataggaatttgggggtgaggggtcacaaacattcagaccatagcacatcagtaccagtttctacttaataccgctctatgaattgactaatttcgcccaactgttgctacattaaccttgtcctcagcagtatttgtgaaatcatcaagttgacatgctagttatatgttttcctaatatacattaaagtaaatatataactctttaaaaaatgttcttctgggttgcacttgaaatcatctcggtgcaaccagtggaacccaaaccacacttagcaaagcaattagtgtcaaagggacacaggcaacagccgaaaaagctcccaaccaggcgcagtggcttgcacctgtaatcccagcactttgggaggctgaggcaggtggatctcctaaggtcaacagtttgagaccagcctggccaacatggtgaaaccccatctctactaaaaatacaaaaattagccaggcatggtggagcacgcctgtagtcccaactactcgggaggctgaggcaggaaaatcgcttgaaccccggaggcggaggttgcagtgagctgagatcgcgccactgcactccagcctaggtgacagagaagactccatctaaaaaaaaaaaaaaaaaaagctcccaatggccaaagctggaacaatttgagcaacaaaataacatagtattgggataaagttcaaagtataaaccaaatatccatgagtccatactgttataaatgattaaataaataaatgagggagggctgggcgcggtggctcacgcctgtaatcccagcactttgggaggctgaggcaggcagatcacctgaggtcgggagttcaagaccagcctgaccaacatggagaaaccccgtctctactaaaaatacaaaattagccaggcgtggtggcgcatgcctgtagtcccagctacttgggaaggctgaggcaggagaatctcttaaacctgggaggcggaggttgtggtgacccagtgttgtgccattgtactccagcctgggcaacaaagtgaaactctgtctcaataaataaataaataaataaataaataaataaataaataagggagaagagacaaatgatccttaaagaagaattctagataatgtaggtagatacaaccccttcaggttgtggagcttaattctcccattgagtgtgggctgcacttagtaacttgcttccaaagagtggaaagggaggaaaaacaagcaacttcccaggggagaaactggacagacactcgcttggccaggtaatcaagtcatgtcgctaacatgtatcctgatgaagtcatgtcaataacatgtacctatgatttgatgagaagagcagtttacctctatgacatgtttccccaaactcataaccccagtctaactatgagaaaagcatcagatgaacccaaattgaggggcactctgtaaaatacctgtccagtactcctcaaagctgtcaaggtcttaaaaaccaagaaatgcctgagtaattgttacaagccagaagaaactaaagggacatgatgactaaatgtagtgtggtgtcctagaagggactctggagcagaaaacaggtggaatttagttcataggaatgtaccagtgttggtttcttagttgtgacaaatgccatagtaatgtaaggtggtaataataggggaagcagggtgagggctatacaggaactctctgtactcttgagtatgatggttaagttcatgtgtcaacatggagggtggttttggatgatattagcatttaaatggttgaacttgggtgtgggcgggcctcatttgatcagttgaaggcctgaataaaacagaaagactggcctccctaagcaagatggaattctccggcaggctgccttcaaactgcaccattggctctcctgggtcatcagcctgcaggcccacactgtgggattcgggcttgccagccttcataattaggtaagccaattctttatgataaatctcttttatgcacacacacaccgtattggttctctttctctggtgagccctaacacaatgggaaatttctgtactctaaatcaaagacttacatttattttctgtaaatgtaaaattattttaaaataataagtttattttaaaaagagagaaggctgggtgcggtggctcatgcctataatcccagtactttgggaggccgaggtgggtggatcacctgaggttgggagtttgagaccagcctggctaacatggtgaaaccccatctgtactaaaaatacaaaaattagccaggcgtggtggcgcatgcctgtaatcccagctacttggaaggctgaggcatgagaattacttgaatccatgaggcagaggttgcagtgagccgagatcacgccactgcactccagcctgtgcaacagagcgagactctgtctcaaaataaataaataaataataaaaagagaaaaaaagaggcatgaattttgaagtcatgtagatccatttatttgtttcctgtgggtgccaaaacaaattactacaagcctggtagcttaaaacaacagaaatttattctctcatagttctggaggccataaattgaacatgagtttcactgagctgaagtcaatgtgttggcaaggctgtattccctccagatgctctggggaagaatccgtctgcctcttccaacttctggtggctgccaacaatccttggcttgtggccacatcagtctctgcctccatggtcacattgcttcctcttcttctgtgtgtgttggtctaatcttcctttccctctctcttataaggatatgtgtgatggaatttagggcccacttggctaatcctcaatgatatcctcatctcaacattcttaatcacatctgcaaaaattattttctcaaataaagtaatgtttacagtagtttccagagattaggacttgatatatttgggtggccattattcagcctactacaccctggctgtgtgaaatgtaggacttttgtagtatgagtaagccggctctatacttaaaaataaaaactatgacataacctggttttaaaaaatgttcatctgggttccacctgaaatcatcgtattatgaccactagtgaggtaggaggcaggactcgagtctggaggtggggttcagacactggaccaaattgaggactagctaaagcagggatggggtagaagaagctttccataagacatgcccaccagtgtgccatgccagtttaccattgccatggcaacactcagaggttactgccctttccatggtagtgacccaagaccaagaagttaccacctttttcctagaaatttctgcataatctgcccctgaatttgcatgtaaataaaagtgggtataaatatgactgcagaactgcgtttgagctgctactctaggcacactgcctatggggtaaccctgctccacaagaagcagtacgtctgctgctgccgaacactgccacttcaataaaagttactatctgacatcactgacttacccttgaattctttcaagtcaagaaccctcctgggctaagccccaattgggatcacctgccctgccttggtgggacccaagccacactttgccaaacagtgtaagagattggtcttagaggtcagagagttctacattctaactctggcaagcctgtgactttggttaagtcaacatattccttgaagactatctcttcatctgtacaagaggacactagccctgactcagaggaatgctgtcagaactcctgcagactgtgaaacagatgcacaacaaatgatcagtcacattctcctccccctccattttatagtttgttacacttcacaaaatattttctacatacaataatgtttgatccccataaaatgtgtgagataaagccaaacgtttccttctcagatggagaaactgagacttgatgtcaactgacttagccaactttgcctaactagaagactagaagcagtgggtgtctgagagcatagtcagcagaagcaaagaggcagatgccccccggagatggggcaggtttgctgatctggcatttgatttttttttttttttttttgagagggagcttcactctgttgcccaggctggagtgcagtggcgcaattgcgactcactgcaacctctgcctctcaggctcaaggtgattctcctgccttggcctcctgagtagctgggattacaggcacccaccactacacccggctagtttttgtattttcagtagagacaggctttcaccatgttggccagactgctcttgaactcttgacttcaaatgatccacccacctcggcctcccaaagtgctgggattacaggcatgagccactgtgcccggcctgatttttttttccatgattttcattacctttctgtccccggtaggcatttgagtttatgatccatgatatgttcctaactctggttcacactgctataacttgatcatagacttttggacttgaagctgtaatactcctggggttccccagtgacagcccacccagttttccagtggcttcttggccctggcttctctgatctcacaggcttccccttcttctaaatattgcaaggcaaacccatagtttgtcctctggtttgaccaggttcttggttctgatagccccttattctgagccttccaggcagagactcctacaggactctgccacctcaggacccagcatagggctgggtgtcctgaaggtctgctaaggggactcatgctgagccttcggaaggtcacaaggagagaacagagggtgggctgagggtccacatgccaacatgtcaggagttggactgcttgggttccaatccggctcccgcacctcactgcccctgaccctgggcaaatcaccaaaccctttgtgattggtttcctcatctgtaaaaagggaatcattatagaaccccaaagcaaaattataaggctcgggtgaaatactgtatataaaccttttattacagggctgggcacaaggtgagtgctcgccttgacattgttgcgccagatttccctaagcacatcactgcatggctgttctctcttctggatacggccgccctttctgcctagagacgtttgattcttcctggggggcggtgcagggtcaggtgagcagctggggctccggagggtctgggtctctgtcacttcttgctgcgtcgccttctgtgagtccttcccagccccctaatcatgcccgcctgagcaagaggatgagaaaatgccgaccccgtagcggggactctgctgctgtgcggggcgcggttcgccgaacccactggccgcttctagagagtcggccccagggccaggacctccacttggcaggcgctggggcgcccaggggcagggccagcgcgggaaaggccgcgagtccttcgaccccctggcagtctgggagccggccgcggctgccatggcaacgcccggaagctgccgggaggggaggcaggcccagccgggacgaggccctgcctccagccaacgctccgcccagaacgaagccccgccccggaacgaagccccgcctccagcaactctctgcccggagagaggcccgacagctgcgacccgactggttctgtccgagcccgacgggccgcgctgacccagcgactgtgcctgactgaccacaggtgccgccaccgcctgataatacgagtgtgtcagcttccgtctgactgaacgcaggtttcatgggtgcctgacagaccaagactgctggatctgtcagcctggccgcagctggctgactggctgactggctggctggttgactggctggctgactggctgcctggctggctggctggctggctgctcttgcccggccgccatctgggcctgacgggctgcgtctgaccgggcggcctatctgcctctgcctgaccagcctccatctgtgcttggcgagctgtgtgaccggccgcgacggtctgtgtctgactgagcacaaggttcctagcggccgatcagctgcttgaccccatctctgctgagccggccgacaccgacggattgactctggcaacgcctggcccgagtggcgctaccggcttccagagacttcctgacccctgccgaggttgcaccgctcagcgctgccctgtgaggcgctgactgtggccgcagctgagtgcggctgccccttcacagacagggcgtgcagaatgacggtcgcctggctgtccctccctaggcgcccctggctagctcggcttgcctggcagcgtctgtgtctgagggacgtgttggtggccgccgctggccgcatctgtccccctgcaggtgggcatcaggttgcccccgtgaagtgcagctggggccgagcctggctgaaggacggccaccttctctccagctgtccagcgagggcttctgaggtggtgccctccggggctctgtggcctggacctctccagccacacacagtcagagccttaggggatcccaagcaagggcacccacagggaagagagcctaagacagaggccaagggacaggcaggcagcaggggtgggacttcgggccaggcgaggaacagctggaagaagctccggggctgggaggaggccgcaggaccttgaggtgccggagtttagggatccgattctgtaagggaggcagcaccttgaggagttgggttggtgtgtggggtcctcaggacacgatccctgactttgaatacctttttttgcgggttttggggaaatctctgtcagtgccttgctgctctgcagaagggtcatcccgcagacctcagatctcttcccgaattaattaatttatttatttttatttatttttttctttttttgagatggagtcttgctctgtcgtccagcctggagtgcagtggcccgatcttggctcactacaaactccgccttccaggttcaagcgattctcatgcctcagtttcccaggtagctgggattacaggtgtgcgccaccatgcctggctaatttctgtattttagccgggggtttgtagagacagggttttgccatattgcccaggctggtctcaaactcctggcctcaagtgatctgcccaccttggcctcccaaagtgctggggttacaggtatgagccactgcacccagcctcttcctgaatttaaatctctcccagcctgtgtgtgtgtgtgtgtgtgtgtgtgtgtgtgtgtgccagccacaccaaccacatgcaatggcttcccccctggaaggagttgttctgtaccagaataagggggaaggaaatactggtcagagggatttatttttttaaagcaagcatgggtatgctatgagttattgctattaataataatacaatgaaagcatcagactagtttatttcgaactagctctagcatgctaagatgttgcctctccattaataacagggccctggctgcctcgttgatttcattataggccatgggaggaatgggaggaaatgaacagcttcactcccaagggctttcataacatggatttggatctcagccagtgtgggcagtggggcttcccgggggcaggggactcctggggtgctgggaaaaagaggcagcaacaagttgcatggagcatttgtacctcatttatttattcatttattcaacaaatatttattgagtaccatgtgccaggcactgtgccagactctcactctgtcctcatggaggatagccttatgggatccaggaaacctctccagtgcctcccaactctggtcctgtcaaagccacatgctgggtaccaactgctttctttctgagctagctgcacagctaaaatgggagagctagtagagtacagtggtcctgaaattgtggtccttggacgagcagtatctggaccacctgggaacttattaaaatacaaattctcaggtcaggagatcgagaccatcctggctaacacagtgaaaccctgtctgtattaaaaatacaaaaaaattagccaggcgtagtggcgggcgcctgtagtcccagatacttgggagactcagacaggagaatggcgtgaacctgggaggcggagcttgcagtgaaccgagattgcgccactgcactccagcctggatgacagagcgagactccatctcaaaaaaaaaaaaaaaaattatcgggccctatctcagatggactgaatcagaaactattttagtgtagggcacagtgatctatgttttaacaagcctccaggtcttgctgatgtcctgagaaccaggacaaagtcgtgctaaagtctgagaaccactggtggaataattaattgtgttggctctagtatcacactgtccatatcagaatctcaatgctactacataagagctgtgtgactttgaccaagttattgaatctttctgtgccttaattttctcatttgcataattggtataattatgattaccctaaaccattgttgtacatattacatcacgtgaaaaggttagcgcacaatttcagctctaggaacatatcctgtggacatatttcttttctttctttcttttcttttctttttttttttttgagacagtttcgcttttttcacccaggctggagtgcaatggcacaggcttggctcactgcaacctctgcctcccgggctcaagcaattctcctgcttcagcttcccaagtagctgggattacaggcaccctccaccacgcccggctaattttgtatttttagtagagatgggggtttcaccatgttggccaggctggtctcgaactcctgacctcaggtgatccacctgcctcagcctcccaaagtgctgggattacaggcatgagccactgtgcccggccctgtggacatatttctgcatatgctgaaagacaagtgtaagggatattcattaatttgttgtttataaacacactatttatttatttatttatttttgagatggagtctcgctctgttgcccaggatggagtgcagtggcacgatcttggctcactgtaacctctgcctcccgggttcaagcaattctgcctcagcctcccaagtagctgggattacaggcgtgcaccacggcacacagcgaaattttgtatttttagcagagatggagttttgccatgttggccaggctgatttcaaactcctgacctcagatgatccacctgccttggcctctcaaagtgttgggattacaggcatgagccactgcgcccagccaatgcattcatttctgtaaaaaaaaaaaaaaaaaaaaaaaaaaaaatctttataaaatctttttttttttttgagacagagtttcactcttgttccccaggctggagtgcaatggcgcgaactcggctcaccacaacttctgccccctgggttcaagtgattctcctgcctcaacctcccaagcagctgggattacagtcatgcaccaccacgcccggctcattttgtatttttttaatagagacggggtttctccatgtcggtcaggctagtcccgaactctcaacctcaggtaatccgcccgccttggcctcccagagtgctgggattacaggagtgagccaccgtgcccagcctataaaatctttatacagatacaggctcatgtacatctgaaaggatactcaaggaactggtaacagtgggagaagaaatgggtggctggaaacaggagaagggaaacatttttaccatacatacacccttttatgacttttagattttgcagtatgtgcatgcattttctattcacaaaaatgaaattttttaaaaaagggggcagtacttagcacaatgcctagcagtggtggcggtggtggtgatagcctttctgcagctctgggcagatgattcactgcagaaatgcagcccagagatatctagaggctggccatagcctccagactgtcctcctagcctctcggtctcccttcttcattctatatgatccatgtttccccatcggagaatctttgcattttagagatgtaaaggggcttcagattttctagtgcaactgttttaacggtgaagaaactaagcccccaaaagatgccataaccagtccaaggttatcaacagggttcaatctagggcctcttttacaccatcctaagttttctaaaattctgctgtcattccatcactgctctgcccgtgaatcctcaacctggctattaagactagctgtggtctaggccaagcacagtggcttatgcctgtaaccccaacactctgaggccgaggtgggcagatcacttgaggtcaggagtttgagaccagcctgactaacatagtaaaaccctgtctctactcaaaatacaaaaattagctgcgtgtggtagtgcacatctataatcccagctactcgggaggctggggcacaaaaattgcttgaacctgggaggcagaggttgcagtgagctcagagtctcgctctgtctcaaaaaaaaaacccacaaaaaactagctgtggtttaactcccaaccaaatttccagccttatttgccacccttttcttctatgtgaatcctctaccttagccagatagttctctttattgactccaaatgctcctgctttccaaatgccatactctctgcctgaaatgcctttctctttcctgtccatttattgtggagattctacctaaacatggaagctaagcttaaatcatacttccttcaggaagtcttccctgattacttcagctcacagagctgtctccctctgaactagttaaaaaagttcttgtggctgggcgcagtggcttacacctgtaatcccagcactttgggatgtcaaggcaggcggatcacttgaggtcagaagtttgacaccatcctggccaacatggcaaaatgccatctctactttaaaaaatacaaaaattagctgggtgtggtggtggtgcatgcctgtagtcccagctactcgggaggctgaggtaggagaattgcttgaacctgggaggcagaggttgcagtgagctgagatagtgccactgcactccagcctgggtgacagagtgagactccatctcaaaaaaaaaaaaaagttattgtaaaaaactcctgctccttaagagggacgtaggatgtttgtctgcttcttgggtaatgggaaattaacttggatagagctcattcctcattctctatttctgcagctataaaattgggccaataaccttagccctccttattgtctcaggaaagccctgggtgaggatgccactgagcccgcctggagccaggagctggtctgcagaaactgctgggcctgtttctactctgatgtttacttggcctggaggcccagtgtgatgaaacccggccctgttgccgagcaccttgggaagcctccctccagggtccctctgtgctcagacagtggccctttgtagagtggaggagcagactgaaagcggagctgctggaaaccgtttcctcccctctgcctcgagcaacctcctcccgcagccacagaccatcctgtgcctgggtggcctctgctttaagtctgcagctggcggggtaagatagggtctctaggcagcctgctaggctggaagggtgaggaggggtcctggcaggatggccagctgaaacacagcatcccctaactcaatacagatcacttataacagggctttccaaagaggagactggccccttacaggcaagattgacatttcaccatcccctgccaccactcaataagcgcctaagatttaggctagaagtgatgtggtttgtcccttctgtccctacttcactggcccctatactcactagcgggggggattgggaatccttagacataatcccaaacctggtggagtaggagttcagtaagtggggaagaactaggaacaagaggaaagaaggtttaagagtgtggtataggctgggcacggtggctcatgcttgtaatcccagcactttgggaggctgaggcaagcggatcacttgaggtcaggggtttgagaccagcctggccaacatggtgaaaccccatctctactaaaaatacaaaaattagccaggcatggtggcgggcgcctgtaatcccagctcctcaggaggctgaggcaggagaatcgcttgaacccggaaggcagaggttgcagtgagccaagatggcgccatttcactccagcctgggcgacaagagtgagactccgtctcaaaaaaagtgttgtataggtgaaaggacacttaactggtctggggggcaggaagcctgggattccatttctgctgagctactgacttgctgggtgacattagctagttgtttcccttttctatgcttcagtttcccagctgcgaaactgtggaggtggagtaaataaatgttaaggatttttgcagttctaatttttcccaattctttgatcagaaggaggaaaggaaagctgggggtgggttggaggtaaataactggcaggatgccttccatggattcacctgcagtctccaggcagcttcttctctgccactaagatctcttccccttccgtttctccccctcttctttccaccccactctgagggcttcttgtgatgagatctaaaagctgtcttacttacaattgcttatactgtcttttgcccacaaagggaggagactgtgcacaatcatggagggcagtggcaagtctggtggagagggaaggaggtcaggaaataaacgagagaggaaaattaagaggtaaggatgtgatagagggaagtattgaaagaaagctcagggagagtgaaaaggaaggaaaaggggagagagaggaggtaaaagtgaaggaaagaggttgagtgcagtggttattcctgtaatcccagtactttgggaggctgaggcaggtggatgacttgaggccaggagttcaagaccagccagggcaacatgacaaaaccccatctctacaaaaatacaaaaattagcgggacatggtggtgtatgcctgtagtcccagctactagggaggctgaggtgggaggatcacttgagcccaggaggtcgaggctgcagtgagccatgatggcaccattgcactctagcctgggtgacaaagtgagatcctgtctcaaaaaaaaaaaaaaaaagaaagaaaaagagtggaatgaaatggagaataaggaaggtacaaatgggagagaaaaacaggaaaagaaaccatgggagaaaaccagagcctgggcaaacgaacatgcaagtggagacatagtgttttctaggacaacaaaacactttagtttggctagagctaagagtgtggtaggtagacaaaattagaatcagattgtagaaggtcttggatgccaggttaatgattttgaactttatattttttattttcctttgttcaaatcccctgtgataagttgttttattttgtttagagtgggtatcaggcagatttctgggtgaggcccagaggagcatttttattcatccatccattcaacaagggactatgtcttatccaacttgtatccctagagtataacacaacatctgcatataagacagaaagtaagtgcttgttaaaattaagcattttggccgggtgtgatggcacacatgtgtaatcccagcactttgggaggccgaggtgggtggatcacctgaggtcaggagttcaagaccagcctggccaacatggcgaaaccatgtctccactaaaaatacaaaaattagctgggcatggtggcatgctctggtaatcctagctactagagaggctgaggcaggagacttgctagaatccaggaggcggagatgcagtgagccaacattgcgccactgtactccagcctggacaagagagtgagactaggtctcaaagaaaaaaaaaaaattgagcatttggagaaagcagtagttgagacagtctcacagagaatataagaataatcatattaaaaggtaaaaagtgctaggtgcccagagagaggcccagaaaagggagatcagaggagaatgagacagccttccctgctacctttagcagaaaagtcccaaagaatattataatggggccatcttggctacttgaattaatccttgtggcctgaaagatacattctgttggagggtatagggttctgtctatcttctgagtgaagggcaaagagttctccgaagaaaagggagggattattactggaagaagggaaattagaactggcatgtctgccaggtctgctgtagtggaacaaggtgaggcacatatagggaacagtgagaaggattaggagctcttcaagagtggtaacagttaaaaatagagctacaggccaggtgcagtggctcacgcctataatcccagcactttgggaggctgaggtgggagaattgcttgagcccaggagtttaagaccaacctgggcaacacagtgaaaacccgtctctacacaaaataaaaaattagccaggcgtggctgggcgtggtgactcactcctgtaatcccagcactttgggaggccaaggtgggtggatcacctgaagtcgggagtttgagaccagcctgattaacatggtgaaaccctgtctctactgaaaacaaaaaattagccagacgtggtggcatatgcctgtaatcccagctacttgggaggctgaggcaggagaattgcttgaacctgggaggcagaggttgcagtgagcgagactgcaccattgcactctagcctgggcaacaagggcgaaactctgtctccaaaataaataaataaataaaaagaaagagagagagagaggtgcaccatggagggcctcaaataccaagttgtggagtttgaacttgtctcttgaactgagagtgcgcttgttgaagttgtgctttgggagtactaatcaggccaccaaggtatggaatggactggaggcgagaagaccaggactgatgggaaattgttctggcatgtcctctggtaaagcctaagcatgagatccttcacccacatcaatgtgttttccgttgtaacttggtttggtttttttgttgttgttcttcttcccattctaggtcagtggattcaaaacgatgaaagtggattcaaaacctctgtcaaggggtgctgtcctttcctggccaagtctcttttattctcttagggctgcaacctcttcacctgggaaatgaatggtcctgtgatttacaagagcaggtaagcacctgcaaagggctttgaagattgatgggcagagtttccagctcaatttctggggagtggcagtatcagcagcaccccgtccctggctctgacataacgatgggagaagcagctccaaggcatcctgctttttttttttttttgagacagagtctcgttctgttgcccaggctggagtgcagtggcacgatctcagctcactgcaacctccgcctcccgggttcaagcaattctcctgcctcagcctcctgagtagctgggattacaggtgtgtgccaccatacctggctaatttttgtatgtttagtagagatggggtttcactatgttggtcaggctgatctcgaactcctgacctcgtgatcctccctcctcagcctcccaaagtgatgggattacaggtgtgagcccctgcgcccagctggcatcctgcttttgagcaggaggtggcccaggccgtagcccagagtcaactctctcctcttcccaaatatctccacaaaggaaaactctgtagcatagcctaagagggagcataagactttgaagtcagacatcccaggccttggtcctcagttgtgcttcttcctagctctggtattttgaataagttatgtaagttacctgagcctatttccttgtatataaaatgggggttgcaatactaatttcctgggctcgtgagagtagagtaagctaaagctaaaaaagcacttggcacagtgccatacaagccacaggcactcggccagtgtgaattcctattcattttttaagaaacagagtcatgtactgttagaggtagagaggtgttagatattcctggtccaatcctctcattctacagtggtaaaaggactcccaggaaggtttcctcttaaccaatctaattctcttctgtcacaatatctgctgattctgtcctcaactagaagcagagaactgagctccaccttctatgcttagctacataaatccgatgggagttctatacctgttcaaaaaagggtattttggttcctccatttttccccccaagaacatttgcctatcatttgctctttgctctgctaaaggtgaagacaattagtgtcccatactcaaagtgatcacgaatatgtgggaagatcatgagcaacacagtatagatgaatcctaagtaaatccagcaatcttggaatatctgaaggaatttgctcccaattattcttagataagctaagaaatgaatacaactgttagttatcgtgtttgtgtttttgtttttactctgcttaattttttaacatttttatttatttctataattatagaaatggggggggggggtctcactatgctgcccaggcaggtctctaactcctgggatcaaatgatcctcttgccttgacctcccaaagtgctgggattacaggtgtgagccactgtgcccagcttctgcttaatttttatttcccagttggcaggggctccctaattctttagctttacttttttatggataaaatatacatagcataaaatttatcattttaactattttttgacagataaacagtttctttattcctcctcatcctcctcctcttcttcatcttcctcttccaccttttcctgggcaactttagcaggaccatttgcaccatcaaactttccttttgccttatagtcagaaacatccttctcatacttcttcagctttgccgccttagtgaagtaaggctgcttttcactgtcatttaagctattccacatttcacccaacttttttttttcttttgccacgtctccaatagagatgccagggtttgtggatttgatctcggggcagaattctgaacagaacaggaagaatccagacagtagccttttggggcattaggatccttcttgttgcctcctttagctggtccataatccttcatttcccgatcatagtgtactttatccgcctttgccatttcattgaatttagacttctctttcccagacatggtcttctacctctcggagcacttcctggaatattctgcaaaattgacaaggacctctgggtttttcttcttatgttcttctctgcacatctgcacaaagaaggcataagcagacatctttccctttggtttcttggtgtcacctttagccatcctgactgaatttcttcttccttcccggccgcctagcaggagggaaggcggaggggagtgaagggcgtggggaggagagggagggccctgggaggcgaagcagcaggaggcggcgacgtggcccgaaagttctgcaggcgctgcggtggcggccccattttaactttttttttattttttattttttgagagggagtctcgctctgttacccaggctggagtgcagtagcgcgatctcggctcactgcaagctctgcctcctgggttcacgccattcttctgcctcagcctcccgagtagctgggactacaggcacccgccaccacgcccggctaattttttgtatttttcgtagagacggggtttcactgtgctagccaagatggtctcaatctcctgacctcgtgatccgcctgcctcggcctcccaaagtgctgggattacaggtgtgagctaccacacccggcaaacttaaaaaaaattttttttttgagacagagcctccctctgtcgccaggctggagtgcagtggtgcgatctcggctcaccacaacctccgcctcccggtttcaagcgattctcctgcctcagcctcccgagtagctgggattacaggcacgggccaccacgcccagctaatttttgtatttttagtacagacggggtttcgccatgttggacaggctggtctcgaactcccgatctcaggtaatctgccagccttggcctcccaaagtgctgggattacagacgtaagccaccacacctcacccattttaactatttttaagtatacaattcagtgacattaagttcattcacaaagtagtgtaatcatcaccacttcctatttccagaactttttcatcatcccaaacagacactctgtacccattaaacaacattccccattttccccttccctcagcctctggtaacctctatttattttaatttctgtctctacgaatttacctattctagatacttcatatgagtggaatcatacaacgtttgtatttatttttgtttgtttgtttgagacagagtacagtgttgggatcatagctcactgcagcctcaacctcccaggcacaagtgatcctcccacctcagcctcctgggtagctaggactacaggcacacaccaccacacctggctaatatttaaaaattttttgtagagacggtgaaacaggaaccctcgaagggtgtgcaatgggggtgtggcttgcttcttcagtgccctgctgctcaaacctctaggggagcatacagatgggcaggctgtggggctccgaccccacagcagtgtctaggggtgaatgtttacagctgaagccccaatgggcgtgtgttatagggtgctcttttaggttgccatctataggcggcttgtgttaaccagctcaattaaacccccttccttaccacaaggacagagggatttctgtatcctggggtttcttgccttgttgtacctggaagaactggatcacatgtgggcttggagaatgagtgcaaggttttattgagtagaactagctctcagcagatgggggagttggggagccagaagggaaatggttttcccctggaaatgttctcatcatgttcaccaacatggtgaaaccctgtctctactaaaaatatttttaaaattagctgggcatggtggtgtgcgcctgtaatcccagctactcaggaggctgaggcaggagaatcacttgaaccggggaggcagaggttgcagtgagcagaaatcgagccactgcactccagcctgagtgacaaagcaagactccgtttcaaaaaaaaatgttagtaaggatgtgaagaaagtgaaccttcatatattgctgggggactgtcaaatagtatcgctgctttgaagttcttcaaaaagtaaaacagagttaccacatgacccagcaattccactgctaggcgtatatccaagagaaatgaaaatgtatgttcataggcggggcacagtggctcacgcctgtaatcccagcactttgggaagccaaggtgggcagatcactagaggtcaggagttcgagaccagcctggccaacaagatgaaaccccgtctgtactaaaaatacaaaaattagctgggcgtggtgtcaggcacctgtaagcccagctactcgggaggctgaggcaggagaatcatttgaaccagggagatggaggttgcagtgagcagagatcacgccactgcactttagcctgggcgacagagtgagacactgtctcaaaacaaacaaacaaaaacacaaaaaacaaaacaaaacaaaaatggaggctgggcatggtagctcatgcctgtaatcctagcactttgagaggccgaagtggtcggatcacctgaggtcaggagtttgagaccagcctgaccaacatggagaaaccccatctctactaaaaatataaaattagctgggcatggtggcacatgcatgtaatcccagctactcgggaggctgaggcaggagaatcacttaaacctgggaggcagaggttgcggtgagctgagatctcgccattgcactccagcctgggcaacaagagcaaaactccgtctcaaaaaaaaaaaaaaaaaaaaaaaaaaaagggaggtggggggcactggctgtggtggctcacgcctgtattcccagcattttgagagaccgaggtgggtggatcacctgaggtcaggagtttgagaccagcctggccaacatggtgaaaccccatctctactaaaaatacaaaaaaattagccaggagtgttggtgcatgcctcccagctactcgggaggctgaggcagaagaatcacttgaactcgggaggcagagcttgcagtgagctgagatgtgagccgagattgcaccactgcactccagcctgggtgactgaatgagacttcgtctcaaaaaaaaaagaaagaaaatgtacgttcacacaaaaacttgtacacaatgtttatcgtgttattatttcttatagccagcaggtagaaacaacccagatgtccatccactgacgaatagctaaacaaaatgtggtatatccatacagtggactattattcagccataaaaaggaataacactgattcacactacaacatggatgaaccttgaaaatcttacgctaaatgagggaaaccaatcacaaaataacatatattgtatgatccatttatatgaataaatcaagacagaaagtagattagtggttgccaagggatagtaggaagttgggaatggggaataacggttaatagtgtgactgcccagtgtgctcaccttgcccactgccaagacagagccgatttatcaagacagagaaattgcaatagagaaagagtaattcatgcagagccggctgtgcgggataccagagttttataattactcaaatcagtctccccaagcattcggggagcagaatttttaaggacgacttggtgggttgggggaagccagtgagccaggagtgctgaatggtcagggatgaaatcacagggagtcgaagctgtcttcttgagctgagtcacttcctggatgggggtcacgagatcagatgagccagtttatcaatctgggtggtgccagctgatccatcaagtgcaggtctgcaaaatatctcaagcattgatcttaggagcagtttagagagggtcagaatcttgtagcctccagctgcatgactcctaaaccttaatttctaatcttatggctaatattagtcctacgaaggcaatctagtctccaggcaagaaagaggtctgcttttggaaagggctgttatcgtctttgttttaaactataaactacgtccaggcacggtggctcatgcctgtaatcccagcactttgggaggctgaggcaggtggatcacttgaggtcaggagtttgagaccagcctggccaacatggtgaaatgctgcctctaccaaaaatacaaaaattaaccgggtgtggtggtgggcacctgtaatcccagctattcaggaggctgaggcagaagaatcgcttgaacccaggaggtggaggttgcagtgagccgaggtcatgccattgaaccccagcctgggtgacagagtgagactccgtatcaaaacaaaaacaaaaaaaacctataaaaactataaactaagtttctcccaaagttagttcagtctatgcctaggaatgaacaaggacagcttggaggttagaagcatgtagagtcgattaagttagatctctttcactgtctcagtcataattttgcaaaggcagtttcaataggcatgggatttctttttgggggtgatgaaatgttctggaattagagagtggtgatggtttcacaactttgtggatatactaaaaaccaactaaattgcacactttaaaatgattaattttatatgttaattatatctcaagaaaaagtacagtatatgatagtaggcacccatgtacatactacctaattccagaaaaaaactgttacaaataccattgcaatttcctatgtactgttcttccatcccattcccctccctctctacccagaagtggccactaccgtgaagttggtgtttatcatggcaattgtcttcatttatttgggctgctatcacgaaatactttagactgagtatcttatacgcaacagaaacttatttttcacagttctggaggttgggaaggccaagatcaatggggtgagggcctactttctcacagacttcacgtttttacggtgacctcacatggtggaagggaccagctagctctcttaggtctcttttataagggcagtaatcccattcatgagggtacccaatcatctcctaaaggcctcatcttctaacactgtcacatttgggattacgtttcaatgtatgactcttggggacacacaaacattcagagcatagcagtaatacatgtctttataacttttaacaaatgtatgagtatccctaaacaatatatagcattgctttgtatgtttttaagcttaatatacatcacataagttgcatcctctgcaatattcttttttcctaccaacattatgtttttgagaattatccatattcttttttttttttttttgagacagagtctggctctgtcgcccaggctagagtgcagggtgtgatctcggctcactgcaacctctgcctccagggatcaagtgattctcctgcctcagcctcccgagcagctgcgattacaggtgcccaccaccacacccagctaatttttgtatttttttgtagagacagagtttcaccatgttgttcaggctggtctccaactcccgacctcaagtgatctgcctgccttggcctcccaaagtcctgggattacaggtgtgagccactgtgcccggtgaattatccatattcctaccactcactgctgtgtagtatttcattatatgactacactataatttattttgtatatttacctattggtggacatttagactgtttctaatttttcaatatttcaaacaatgcttcagagaacatctccaacaggtttccttttgtgcatgttcatttccctgggttttatattcaggagtaggattgccgagtcaaaggcctgcacatcttctacttcgttagctattgccacaagtccattactagtcaggtggagcgttttcatatgtttattggccatttgtatttcttcagtggcttaatgttcacatcctttgtccatttacctaatataaatttgttagtaattctttacatattttcgaattctcatcctttgccagccaaaacattgcagagattttctcccatttagtagtttgtctttttccctttatgacatcttttgatgcacagaatttctacatttaatctggctgaccatatcaagttttttcatttttgatttgtatgatgattaattttatgtgtcaatttgactgggtcatggcatgcccagatatttggttaaacattattctgggtgtgtctgtgagggtgtttgtagatgagattaacttttgaatctgtagactgagtaaagcagattgcccttcccaagtgggtgggcctcattcaatccattgaaggcctgaacagaacaaaaaggtggagtaagagaattctttctccctgtctcactgtgctcatgctggtacttttgtcgtctcctgcctttggacttttttttgagacaggttctcgctgtcacacacgttggagtgcagtggtgggataccggctcactgcaacctccgcctcctgggttaaagcaattctcttgcctcagcctcccgagttgctgggattatagactcctgccaccacacccagctaatttttttgtatttttagtagagatgggatttcactatgttggccaggctggtctcgaactcctgacctcaagtgatctgcctgccttggcctctcaaagtgctaggattataggcatgaaccactgcacccggcctgtctttggacttttatctggaccattggctctcttggttctcaggcctttggactcagactagaactaaaccattggctctcctgtgtctccagcttgctgactacaaatcttagggcttagcttctataaccacatgacctaattttttataatactctctctctattctattggttctgtcagaggcgtttgaaccagagcaactccatcttgagtaggtgctaggtaaaataaggctaagacctgctgggctgcattcctagctggttaggcattctaagttacaggatgagataggagggcacaagatacaggtcataaagaccttgctgataaaacaggttgcagtaaagaagccggctaaaacccaggaaaaccaagatagcgacaagagtgacctctggtcgtcctcactgctacactcccaccagcaccatgacagtttacaaatgtcatggcaatgtcaggaagttaccctatatggtctaaaaggggaggcatgagtaaaccacccattgtttagcatataatcaagaaataaccataaaaatgggcaacaagcagccctgggggttgctctgtctaaggagtagctattattttattcctctactttcttaataaacttgctttcactgggcatggtggtttatgcctgtaatcccaacactttgggaggccgaggcgggtgacctgaggtcaggagttcaagaccagcctggccaacatggtgaaaccccgtctctactaaaaattcaaaaattagccaggcatggtggtgggtgcctgtaatcccagctacttgggaggctgaggcaggagaattgcttgagcctgggaggcagaggttgcagtgagctgagatcgcgccactgcactccagcctgggcgacagagtctccattccccccatccccccaactccaaaaacaaacaaacaaaaacacaacttgctttcactttaccctatggacttgccctgaattctttcttgtgcaacatccaagaaccctctcttagggtctggatccagacccctttccagtaacacttctgtttttctggagaactcagagtaatacaatttgtgactgcgtcttgttaaggaactatttccctaccctgaggtcctgaagatgattttctttagtttctaaagatcataaagttttgcttttcaaattcaggtctttaatctaaccgggggttattttaatgtatgctacaaggtaggaagccattttattttttttccaaatgattaacaagttgttcagtgttattttaaaacaatccatctgtattagtttcccagagctgtcataacaaattaccacaagctgggtggcttaaaacaacagaaatttattttctcacagttcagaaggccagaagtctgaaattaaggtgtcagcagcactggttccttctgaagattctgagggagaaaacctcccatgcctctctcttagcctctggcggttgccagcaatccttggcttgtggacacatcactaatctttctctccatcttcacatcgttttatattctgtttccctgtgtcttctcctcttcttataacgacaccagtcattggatttagggcccaccctaaatccaggatgagttattcttaaaatcttgagctaattacatctggaaagaccccatttccaaataagttaatattctgaggttctgaggggacatgaattttgcggggtacactattcagcccactatatagcatcatcttttgctactcttttgcaaattctatttctgttgtttatccagtgtccatttatgtgtgggcagagtggtcattttataatataaatctctgatgaaatggttagacatttttcatgagataatcttatttaatcctcacagcagtgccgtgaggtagatgctactaaaatcacctactgttgagaggtgtgccagtcagcatttgctaagtatgacgtgataacaaacaaccccaaactctcagtgacttacaaaaagccaattgctttcttcatcacattacacatcacagctgtagattcactgcagctttgctctgtgtcttttcattccagggtccaggctgaaggtgcaggccctatccaagacacaacatttccagtggcagagataaaaaagtaagatttcagactcaaacatgcaatggcactccaagtttctgcttcgaactggcatgtatctctctagctcacatttcattggccaaaggaagtcatgtggttaagcttgacaatgggctggggaagtgcactccttcctctggaaggtacacaagtcacatggcaactggctaggatggataattctcttactggccaagggaagggcaaataatggagaaaaataatacgtcaaccacaggggttgagtaactttcccaagatcaaaccactgggaagggacagaggcagattcaaactcagacagtctccaaagccatagtgaactccatggctccctactgcctgttagatggaatccaaatatatttaagctttagggcattcctgcagcctggagggcccttctacctaatttgtgtgctgaattcactctttaaggctccactccaatctcaactccttggactcactcttatttgtcatgtgttccctctgctctaaggcccttgtacagtgttcccaaatgtttgcagtattttgggatgaaaggagtgaggggcacaagctgcaagtggactgtgctcctgaggatgagagcactttgcctacttttccacccctctaaactaagcttagtatcttgtgcttgggtgactctgacaggtcagccccgcatgactcactctgtaagccttcagcgcgggtcaccacaaggtcctggtttagggtgtgtgagttggtgggtggggaggggaggtggaaattaactttcacctttcaggaacctttcccttccccaggagaaggacaagtgtaagtccttcccttaagtagtctgggcaagtctctactcatcactcctaggaggactggggaggtcctggaaggtgcagaggaggaagctctgagaagtagaaacagcaccaaactgcaccatagaagactttactaatttgtccaaatgacagaatttaccttctctgagcttcagtttccccagctataaagtggcaacaacactgatcttgccctcctccctaagttgctacaaaaagacatagtaaaaatctttagggtgccgggcagggtggctcacggctgtaatctcagcactttgggaggctgaggcaggcagatcacctgaggttaagagttcgagaccagcctggccaacatggtgaaaccccatctctactaaaaatacaaaaattagccaggcatggtggcaggcacctgtaatcccagctacttgggaggctgagacatgagaatcgcttgaacccgggagatggaggttgcagtgggcaaagatagtgctactgcactccagccagggtgatggagcaagactccatttcaaaaaaaaaaaaaaaaaaaaatctttaagaatgcagccttgaaatcgcacagacttgtactggaatccttctcataagctatgtgactgagaaagttatagatcttcataagccattacagctacctcccagggtgagaaaattatgtaaataaatttcctaacatatactaagtactcaataatgttggctattcctatatgagatgatgaaacttattattatatagggaaagtcccagacgaggacccatttttgaacattgaaaggagggagtacagaggctaacttttcttagaattggttgcttcttttagccaagtataaggtgtggctcaaaggaatgaggaagcagttaatgaggtgacagggcacagaatactgtttgtcttcacagatcttgggggagggatacagtggttagctgaccttcccaaaagatcagagatcctggtgtcttgtccacccacagatgcaggccacttgactctgtcctgtcccctcctaccagtccagtcaccacgttctggtgaggctgcctttgaaataataataacaatggtacttgtactaatgatattattactttgaagtgtatgaaggctttctaatacatcatcccagttatccttcattatctctctcccattcacagaatccagagttaggaaggatattgcagatcattctgcattttacagatgggatctctgaaatttgaataaaggaagggatctactcaagggctgggatttacctgagactacacaataagttaatggcaggggcaggactagaacctgcagctcctgactaccagcctagtgccagtgcctctttcaagtcacacttgcattggctttccattcccatggcctcccagtctattctttttttttgttttttgttttgttttgttttgttttgagacgagtttcgctctgtcgcccaggctggagtgcagtggtgtgatctcggctcactgcaacctccgcctcccgggttcaagcaattctctgcctcagcctcccaagtggctgggattacaggcacccaccaccatgcctggctaatttttttgtatttttagtagagacagggtttcaccatgtttgccaggctggtcttgaactcctgaccttgtgatccaccctcctcggcctcccaaagtgctgggattacaggcatgaatcaccgtgcccagccccagtctattcttttatctcctggaccactgcagtggtttcctactggtcctgcctgcctctgatccctccccacccatttcttctacacatacagtcacataattgtctggaagcacagctttgatcttgtctttcccttcctaatagaacttgcccattttttcaacttgagaggtcaccaggatcctagttcaatttcccaatgaagacttaatctttccttgaatacatatattgacaaggagttcatcactcccaaggtggtccattccattcttgggtagctccaactgttagggagttctttatagtgagctgaaattgtcttcctggatatccccccactggaggtgatgtgatggaattctcttttttttttttttttttttgagaccgagtctcactgtgttgcccaggctagagtgcagtggtacaatctcagctcactgcaacctccgcctcccaggttcagcaattctcatgtctcagcctcccgagtagctgggacttacaggcatgagccaccaagcctggctaatttttttgtgttgttagtagagacagggtttcaccatgctggccaggttggtctcaaactcctggcctcaggtgatctgcctgcctcggcctcccaaagtgctgggattacaggtgtgagccatcacacttggcccctttttgtttttttttttttttagacagagtttcactcttgctgcctaggctggagcgcagtggtgtgatcttggctcactgcaacctccacctcccagattcaagacattcagcctcccaaatagttgggattacaggcatgtgccaccacgcccagctaattttgtattttagtagagacggggtttcaccatgttggcgaggctggtctcgaactcctgacctcaggtgatccacctgctcgaccttccaaagtgttgggattacaggcgtgagccacagcacctggccaatggaattctttcgtatccattctggcagcaaatctgtagtcattgtttcataggaaccaggtcctggatggactaggtgctgaggagaacagcatataaatttgatatggatccttccctcagagagggtggcctaggagtttgctaatgcagaattttttgttttgttgattagacctaaacgaaaggaaacaaagcaaatcctctttctgtatgatagtccttcagaggtgtggagatagtcaccatgtctactctgtgctttcccttctccaagctatttaaatcattcatcatacagcatggcgtccaggtcctctacgttccggtctcctgtagacatgctccagtccccctaagaatatggggctcacaaatgagcttggtggtccagctgtgatccatctagggcagagctggcccaacttttttttttttttttttgagacggggtctcactcttgttgtccatgctggagtgccgtggtgtgattttggctcactgcaacctccgcctcctggattcaagggattctcctgcctcagccgcccgagtagctgggattacaggagtgcgccaccacgcctggctaattttgtattttttttttttgagacagagtctcaccctgttgcccaggctggaatgcaatggcacgatctcggctcactgcaacctccacctcctgggttcaaccagttctcctgcctcagcctcctgagtagctgggattaaaggcacgtgccaccacaactggctattttttttttttttttttttgtatctttagtagagacagggattcaccatattggccagattggtctcgaagtcctgacctcgtgatccgcctgcctcggcctcccaaagtgctgggattacaggtgtgagccactgtgcccggtcaattttgtatttttagtagagacagggtttcaccatgttggccatgctgatctcaaactcctgacctcaggtgatctgcccgcctgcctcggcctcccaaagtgcttggattacaggcatgagacactgcgcctggcctcaactctggtttccgttgatagaatattcatattcactttctcctccttcctttcttcgctttctccttcctccttctctttgttccctcctccctccctccctccctctctctcttctttactccttttctcccttcctttctttctttttggcagcacgttgcattgttgagcttgaggtcaactaaaacctttaagtcactttcactgtaattactgttgattgagattctttctacactgtatttggggcacttgctcatttggaagggcactgtccaatatggcagccattgtggccattcaaatttaaagtacttaaaattaaatacaattattattttgcatttcctcagttggactagccacgcttcaagtgctcaatagccacagagggctagtagccactgtatcagacagcaaagattcaggacatttccatcatcatggaaagttctgtgggactgctctggtttggacctaagagcaggagtttatacttacaatctgaggcacgtcatcttgagagttccagctcagcctccaaaactgctgagagctttaagaaactgattctggtttccggagtcttcattttccctcccaacctcatgacaacagtagatttgatcaacgtttcataccttcctctgcttcatctaaaaccaactgataaaaatacccagcagaacagagaggcttgcaatcgagccctctatgtgacaccctgctctccagtcccatgcggcagttgtgcagtcatttaacaaattaggcctatatcctaggtgctgtgctgggtaccaggtacctacaaggaagtcagaagacatcaattaaaaaaaaaaaagagtcctgctgagttgggtgctctagtagttcaaatgtctttgcttcccattcaaggctgcctcttctgtctgttttgtggttgttaaaagtggaagcttggggctgggcacggtggcacacacctgtaatcccagtgctttgggaggccgaggcaggcggatcacttgagtccaagagtttgagaccagcctggccaacatggtgaaaccctgtctgtactaaaaatacaaaaattagctggatgtggtggcatacacctgtaatcccagctactcaggaggctgaggcaggagaatcacttgaacccaggaggtggaggttgcagtgagccaagatcgtaccactgcactacagcctgggtgacagagtgaaagtctctctcaaaaagaaaaaaaaaaaaaacggaagcttgggagtcagcttcccaagtttggatcctagctctgccactttagaagctatgtgatgtctttgtgtttctgtttcagcatgcataatgtgggaataagaataacctctaatgttattgtgagaattaaacgaattaatgcaaataaagatcttagaacaataaatatagtaagtgttcctaaccggtgagttattatcagttcttattgttaatcataatcttccttcctggacaagccatgttcagtcctgctttggggcctcagttccttagttttgccctcccttagtttgtgtaagtccttggaggcccaagccctgcctctccttcctgctttcttatgttctcagctgctcactttgcacctgctcttagtatcctatacctgaggcatggaccacagtgaagaaccagaattgttgggcttcatcttggctctgtgctgcctggaggggagacctaggataggctcctgatctgcaaaatggggataatcccagctgccacttaagtgagacaagtaggtgaaagctacttagcaggcctttgcatgtcttgacttccagtaaaaccctggcaagtgaatgacatttgcatcttccctgtttcttcctttagcatctaacaaaggaggctcaggctcattattccgggcacttctggagggcctggccctgccccaggagccctagggcaggaattcctttctttatctatagaaggcagacacttcatccctgccccatcttctttcagatgctatcttgggctcgctgaacacgggttagttcctcctctctcctagcctcagtgtgtactccaagaaggacctaaaggagcgcctatacgggccgtggtggttataaccctaatttagaaaagcccattactttgggggtgtttgggcttgtggagggtgggcgtcgggatcccagagccagggactcagcccttggagagtccccagagagtccagaggttgccacctgcgaggggctggaacgcactgggctatcctccgcgagccctggccgcgggaacaatgggagcgcggcgtggaaaagggtgggcgtgggccaggtcctggctggaggtagacgaggtcggcgagctgggcgcggggccgcggggttaccccggggcaccgggcacagagccgagaagtctaagctagggaaaatcgaggtcggcgctggcgggaacccgggaggacgtgggggccccgggtggggtctgctcctcttcttcgcccggcctctgagcccgccgcagctcaggttgacgccgggcccacgtggggaagccggcggcgggtccccagcgccgggagggttcgcggggctcagccccttcctctgctcccctccccgggaccggcgcgcggccccagctccggcggctccggcggctccggcgctcccctggtgttggctgctcgccgccgctgcttgctcgttcgcccgcccgctgctgcttggggggccgggatcgccgccgcctcctccgggggagccggccggggcggggcggagcggcgagagggggtgtggggggcgggcgaggagggggctgagcgccgtgggagggagagcaggagcgagcgcgcgagagagcggggcatttctgcgcagctctagcgcgcctcggagcccgccggggcagccgccggacaccaggaccgcgagccagacagctcccggaagccgcgccgccgccgccaggttagccgcacccgccgtccccctccgcgtcccggggaccccgccgcgtcgggtcccgcgtgtgcgtgtggggtggccgccgagggcggcgggctcgattcccgatctttgggcactgacaggccggcgggccggctccaggagccgcgggcttcggttcgtgtgtgtggggactgtcgcgggtttgtgtgtcggggctccagtctctgggtgtgtgttaggtgtgagcgcgcgtgtgcccgtggatccgtgcgagcggctgctcggtgtgcgcgcgcgtgcgtgtgtgcgccgggtgtgcatctgtgtgtgcgtgtgtgagggtgtgtgccttgcgtgtcttcgcgagtggtgcgtgcgtatctgggtgagggtgcgtgtgtctgcgtgtgtctgtcggtgaatgtatctgtgagagggtgtgtccgaatgtgtagcagtgtgtacacctctgggtgagggcgtgtgccagtggcttcgcttgtggctgcagcctgtggcgggtgtgggtgtgtgtgtgcgcgcgcgtcgctgtgtgcgcgccagtgtaactcccgtgtgtgcgcgtgtgagtgcgggtgtgctcccgcgtagcccccgtgtgcgtgtgcgcggctttgtcttcgcactgccgggaggaagcggtgggggcggcggtccaggcgccgccgccgctgggagctgggcacctggcctgggcggtgggtggcggcggcgggggtgtcccttccccgtcgggcagagactccctgctggcaggtgggcggccacaccccgggggtcgggggaactgggctgacagcagagcccgcgttctgacctgagctggagaggagggcgtgtcctgcttgaagcccgtgtgcgtgcgtgcgtgcgtgtgtgtgtgtgtgtatgtgtatgcgtgcgcgcgcgtgtgtggatgtgggtgtgggtgcggggtggtggtggtagcaacagcagtttccaggctggtgaccagccggttcagggattcatttcctgttgtggccaggggacatgtcccctccggcctccccccagccccccaccagacctagcctgtgccagtctcacccgtgcagggctctgggtgggtgggaaggtaggtgggtagaagctcaggtgccctgaaaaggactaggagggagaaccactctcttaaagggccagctcctcactccagggaatccctcctcaggagacctctctactttgaaagagatgtctctgggtatgtccatacccctttctccaagtactggtgcatacaggcatttctagatctgtagtctgtgtgcatgtgtcctccctgtgtacttcttgtacatttgggtgtatagtgaacagtgaaaatgtatctcttgatgtatatgtgtgtgtgtttttataggttctggtatatttgtttttatgtatgtgtagttgtttgtatattagtctgtgcatgtgggtttgcagagaagtggcattttgctgccaaatggaatagaagagaaacattctgtaccgggccacgccatttttgaaaaactgcgtgaaaaggaagtttgggaatttagtctgtggctttgtgggtttcagataccggtactgaaatgtaggtaggttggattttgactgtgatacaagggtagagagaagtagagtcttataggaggaagaaattgttcagagagaaggatatccaagtgcaagaattcttccattagttccagttcttccccgtaacgtcacatccccctttgctgcttggcttgccaagatacaggacacaggatttggagtgcaaagggagggagctgggagtgtaaaaggaaggaaggtggatgggtgataggattgggggccagcagcagatttctgcaattcttaaaaatgtttccctgccaaaagcagcagaggctggggaaagctgagctttctgtcccctccttgaatcccagaatcccgggacatgggaaaagctggcctggagttcatgagctctggagtctgggccagagatcttttgccttgttctgtcaccgagactggagtgtaggcagtgtcacgatctcagctcactgcagcctccgcctcctgggttcaagtgattctcccgcctcagcctcctcaatagctgggactataggaatgagccaccacgcccagctaatttttttttttttcttttttgagacagagtttcactcttgtcgcctaggctggagtgcaatggcatgatctcggctcactgcaacctcctcctcctgggttcaagcaattcttcttcctcagcctcccaagtagctgggattacaggcacccaccaccacgcccgactaatttttgtatttttagtagggacagggttttgccatgttggccaagcaggctttgaactcctgacctcaggtgatccacccgcctcggcctcccaaagtgctgggattacaggcatgagccaccgtgctcggcctaatttttgtatttttagtagagacagggtttcaccatgttggtcaggctggtctcaaactcctgacctcaagggatctgcctgcctccgcctcccaaagtgctgggattacaggcatgagccgctgcgcccagcctgggatcttcttttgactttagccaaccccttcatgtgtttatctcttcacccaacactttttattaagcttctttatgtgaaagggtctaaactccctaagccttggtttacctggctaggcagctagtgggctagattttgggactttgatgacccttcccttgctcagattgctagagtttgtctcgttgttacccaggttcaggaatccacccttctagtccccagagatcctggccatggtcctcactactaatctccccaccaatatactctagtctagagctgtggttttttcacctcaccaacagcagcagggttacctgggagtttgttagaaatgcaatttattggcagggcgtggtggctcacgcctgtaatcccagcactttgggaggcgaggcgaatggatcacctgaggtcaggagttcgagagcagcctggccaatatggtaaaaatacaaaatttagccgggcatggtggcacgcgcctgtaatcccagctactaaggaggctgaggcaggagaatcgcttgaacccaggaggcggaggttgcagtgagctgagattgcatcactgcgcaccagcctgggtgacagagcgagactccatctcagggaaaaaaaaaaaaaagaaatgcaatttcttggttctcacgccagacctaggaattgataactctggaggtgtggcccagcaatctatgttttaacaaacacaggtaattcttatttactctggagctcaagagaggtggagacagggagccaggaaacatctattaattgaaacacttggaaagcctcccctgtccctcacacaggtgcctgaaatagcactcaggccccacctggtaggtaggaattctgctttcaagtcccaggtcttatgatcttggacaagtctctccttcagtgactaatgcaatgactctttgacagtgtgctgtggaccaggttctgagcgaggggtttccctgatctgctcagtttctccaattcttactttgatctctaaggcccttcaggatccagttcctgcccacttctctggacaacagccactttggccttttagttcatctaggcaccatgagctcttttgcttctgggattttgcacatcctgttccctttgtctagcacactcttcccctgcttcttatcttgattaactcccactcttcatgtttcagctcaatagtcactttctcaggggggcctttgccaactctctaggccaagtcaattttccctgttacacattcttagagctctctgtgtctcacagggcttgtgagaatttgtaattgttgtttgtccctttactagactgtaaatgccatgtgggcaggaacttgcttactaatcttcttagtgtcccacacagtgcctgacttatgatttgtgttcaataagcttgtcaaactgagttaatttataaaatggcagatggcactaaatgatacccaaagtttcgtttcaagccctgacaatgtgtaatccaagcaggcttcagccttttctcaagttgatttacctgtctttttcaatgctgcatctcccatctcctggctgtagatttgagcactcaccgtgggtccaggcccatgctgggctctgctctagtggaggcaggaggaggctcctcaggagacacagcctagcttgggttctgtgtcttcctggattaggtttgtactggaatgagaagaggaaaagtattgaaagaggaatccaaatatctgcgtccatgccttgttatgtgactgagggccaatcactttccccttttggcacgtgtccatctctgtaaaatgaaggtattgggatgggtggcacacttagtagtggttactagcactggctctacagtcattcggggcttgccatgtactagctggggggactagggcaagtgattccatttcctcatttccttacttgtaaaacaggaccagtactagtatctgtttcacaggattgttttgataattaaatgagataacatccttggaatgcttagcataatgtgagtgcataagaaacatttgataaatgtcaactattatgaccattattgctactccacaattcagctcaacattcttgaaggcctttgtattgggccctaggcctacaaaaacagaaatgaatccagcagtattcacaggttgggggtgggagcagacatgtaaagatgcaataccaccgcaaggacaatgtacaagctgccagggtgtggctgtttatggaggaaaaggcttcctggaggacagagatggtgtttgggctggattttaccgtctgggtatttgaaatagcatgtgcaaaggcagaacggcttcttaggggaaccccaaatagttccacatggttggaataggaggtggtgagtggcagggatgagggtggaggagtgaatgactggagataaagctgagaggaagattagggacagatctggtgcaggccaaagagcctgagcaagtcctgcagacggcagggagctggggaagaggagtaagccaaccaggaaggatcagatttgcatttcaaaaacacagctctccaggtggtgacagaggatggttggtctgggaggaagggaaggactgttgacctggagacctgggcacagaggctgctaaacaagctcaatgggaggccccactggggtggatagatacctagaacaggctgttctaggaagctttttcctctgtaagcctgtcttcagcctggtttcacgacagcctggccctggaaggtgcaggagaggtgagagtgacttctcatgaggagcctctgggtcctctttaacctctaaagctgcctaatgagtgggaatctgaaaaacagagtttgagggtcctaggtctgctactcaaaggatgcacagtgtattaacttcctaggggtgctgtcatgaagcacgcaaaccaggtagctttgaaccacagacatttactcccccacttgtggaggctagaagtctgaaatccaggtgtcagcaaggttggctccttctggaggctctggggcaatctgtttcctgcctttctcctagcttctggtggttgccagcaatctttggcatttcttggcttgcagctgcatctgcctctgtcgtcacgtggctttctctctgtttcatttcctcttctaaggacaccagtcatatgggatttagaacccaccctagtccagtatgacctcatttgaacttgagtaattgcatctgcaaagaccctgtttccaaatatggtcacattatgaagttttaggtagacataaatttgggttgggaggggacactgttcaacccaatacatgcaggaagttggggaggagtgcatgccttttagttccacagggctacatccaaatttaggctttgcagtggagcctctatgaaatggagacagtaggccaggcatggttgctcacgcctgtaatcccagcactttgggaggccgaggtgggcagatcatctgatcagatttgtatttcaaatttgagtgatctgaggcggattattcctgaggtcaggagtttgagaccagcctggccaacatggtgaaacgctgtctctactaaaaatacaaaaattagccaggcgtggtggcgggcacctgtaatcccagctactcgggaggctgagacaggagaattgcttgaacctgggaggcggacattgcagtgagctgagattgtgccactgcactctagcctgggtgacagagcaagactccgtctcgaaaaaacaaaacaaaacaaaacaaagaaatgggacagtagcacctacagtagtgtcatggtcatgagacttgatcaaaataacagatatgagcatgcctaatgaggtagtacacagtaggcactcaatacctacttcctttccagctctcccttctctgcacttaggagcttggacaagtcacctaatcttgctttactttcctcatctatcaaatgtgaataatcatcatccagccctgcctacttcaccaaattgcgatcccaggagataatgagaaagctctttgtaaattgcttaagggcttgtagctgtgatttttaattataataataatcatcataataacccttggccattgtcatatccgctgcattctcctcagagcccagcccagcccagcccgctcctctcctgagacaggtcctctttgcctgtttgtgctcagaggcatcccatgaagtgtcgcctctgtctgagttgggaggaccttagagatggtccttgccgttgcccttattagcctgaggagggaaacatgctcagggagaaaaagtgacacccgcaaagtcacacagctggtcagtggtaattggaacaccttatctgtggctcctgtcttcagtctgaacagtgctttttccctagttgcaactttaggcccagaagcaggagctcagggcagatagaggcctggagtgggctctgcatatgttccagaggtgaggatgcaacaggagagtgtcctgctgtcaggattagaaccccaagaaaggggtccctgggctctgagtgagcaggctgaatgggccggttgttctgttatcactctggctatggccatctctgcctactctggtgggagggccaccatgcggggctctggagtctagatgtaacccaaggcttcagtgtccctgttgacagccagggtggcatttctcagcaggtcctgtccctctaagccttgccttggtgggtctagggaaagctctgggaaagagagagggcttatactgtcctggtagtttctggcaagtcatcttcctttccccccacactggggaagccaggcccctccttggccccttgattcttctttcctttcctccctcctcttctcagtttgctctctcccttctgtctgctttctccccttccctctccccaccttgtccccagattagaggtctaaagatagagtctccaggcccacttcaggtgggtggttttgggtttgcttgaggccacctagaattagaaagtctagagtcttcctcataagaggctcactctggtgacttataatcaactgcttatgtttattggcttactgtgtgccaggccctgtgctaagcgctttacatgccttatgtcttttaatccttacaactaccaagtgaggcagagatgatgatccccgtcgtattacaggaggctaaataacttgcccaaggcctacgcagtcctcagccagcaagtggcacagctgggatttcaatctagatctgtccgaagcccaccggtactcttgagtctttcctatatggcctgtgacagagcctgcgggagcatttaggtgtccacagaggggcatgcatttgctcaaattcagagaacaaattcttgactctgaaagaagggcttccaatcgaggaatcttccctcccaggcctgcactctggcagcacctccgggactggcctttctacagcatcagccttggggcccgccaaggctctgagcccatctggttctaggcagctgcccacctgtaggagagacactgcatcggtatggggggtggtgacagggcccatctgaaggtacttgccttttttcctagttattgttttgtctctggccacctcaatttttcattgaatcgagtcttccacttaaagaagcatatcatttgcaaagagcattacttttgtctcctcacaagactgcttgggagcttggatatgctgcaggctcagtgacgggtggaactctggaagaagtggggagggaggcagagaccggagccaggagacccaggttcagaggtacatatccaccagaagaaaaaaaggagctggcctgagggccagagggaggtggcctggagagagggaggaataggaaacctgctctcaccccatgtgcagcccgggagtccagactccctcccagtcagggctgctggtctcagactgtcactcaggaatctgggcagctgcagtcagcttgttgagcctccacccaccccaaccgagaccattatgttggtcagcctggctcagcccagccacctgcctgcctgagcaggtggctcagtcagaagggaccttggtgaaggagtggtggctttgaaacttctatccacagagccactcttcataggcaagggagcagaagttcaatttgtgaaacacctaaaagggggagcagcttagcaccccaccccattcccctccctcctagggttccctaaggctgggcctctcaaactttgtttccccctaagagcaacaaaggtgagcatgctaaaaagcaaaataaaacaaaacaaaacctgtgtgccatggctcatgcctgtaatcccagcactttgggaggctgaggcaggtggatcacctgaggtcaggggttcgagaccagcctgacatggtgaaaccctgtctctactaaaaatacaaaaattagctgggcatggctgcatgcacctgtaatcccagctactagggaagatgaggcaggagaatcgcttgaacctgggaggcggaggttgcagtgagctgagatcacaccattgcactccagcctgtgtgacagagtgagactctgtctcaaaaaacaaaacaaaacaaaacaaaacaaaacaaaaaaaacaaaaaaacccagcactctttttccagacctcacccaagagattcaaacccagctgctccatgggcggggtggggggtgggcgtcagatccgaggtagggccccggaagcagcctgctgtaacagtctccccatcgagatgattgggacacagatggttctcagattgcccttgtagaaggctggcctcagatgttcatgaacttctgaaatatggcatgcacaatgttaagagtgtgcattgtccctaggagaggatccacaggcaccgtctgtcttggagtcacaacccatacaactttagaactgctgtcttcagggttgttttgcgcagttggagcctaacgtctagagaaaggtcaccagggagccaatggcagagctgggtggagagggctggtctctcatgcctctcagcacattactggctttgctgtgaaggtggtcagggactgtagacctgtccctctgtctgggcctcagttttcctagctgtaaaatgggggttggacaggataatcccaagtttccatgcagctttgatctgtggttctggaagtcaggtctcctgctgcccagtccaagttctttgtccttttccttgctcctccctggcttcacccaccactggggggacctcccacttttgcatcttccatcttcagagattctggacacagcctgcattctggccccttgagtcccttctgtctgaccacatgcccaaatgctcaagtcctttctccctttccgtccccactcaccataattgagcaaggtgcctgtgaatctggggaagctcaaggtgacctctgttcagagctggacatgtgggtcagtgccaaggggagggctgcgaaaactaatttcctgaggctcctgggacacacccagtgcttcctatgtctttgccctagctccctctgttcctccctgccaagaatgccaccccctccattccccaatcactgttgaaatcctgtctgccttttcaaggctcagctcagatgccagcctatgtcctacaaagccttgtaagccctccccctcactccaagatgaaatttgtctttaactcctctgcactcccttagtaccttatctgttcccctctgggggatgagttctttttggtcttagctttatccagggaggtggctttcaccgggttgtgagcactgggatgccttatgtcttattctttgcttcccagcacctagcatggggctgtgcacagaacaagttcttaattgaggcttactaagtttgcagaatctgcctccagctctgggctgagctggcctctttacagcccctatggcccatgtcactggcaggccatggtttctcacagggcccctccctctatttgtggattggagggaggccaagtagggcaataagaacttaaattccgatcttgattctgccatttctgggctgtgtgaccttgagcagatcacttcctctctccgagccttaattttctcagtttaaaacaaagaggtagggatgacaagtctactgggggcttgggtgaattaactgaagtgctttgtgtaaaatgctgataaaagcattgtaaagaacaaatagctaataaatgattatgagttattattttttggttaatagttattaccattgtttctttttctttctttttttttttttttttgagacagagtctcactctgtcgcccaggctggagtgcagtggcgtgatccagctcactacaagctccaccttctgggttcacgccattctcctgcctcagcctcctgagtagctgggactacaggcgcccgccaccatgcctggctaattatttttggatttttagtagagacagggtttcaccgtgttagccaggatggtctcgatctcctgacctcatgatctgcccgcctcggcctcccaaagtgctgggattacaggcgtgagccaccgccccggcattattaccattgtttcaacaaacatctactacgttctgagcattgtgctgcgggggccagggtgagagacaaaaaaataataataacaggagttccttggtctccagggtcttaaggtcaaatgaggcagtaagactctagtacaagaagtcagtgtctggcagagatgtggctgagtgagttgaggggggagtcattagtgtagaggtgacaacaggctagaggtgacatttgagccagaagggcatgaagtaggaagggcaatgacaggctgggaggagacccatattccctgtggagaatggggaagtggggtgcatatttggagagtttcaggaaggaggcgggaaagagcagagcggaagcagagttagaatttccctgcagaaggggcatagggtcggcaccccggatggagcaggaacttcaagctttgttttgccaagaagaatttgggggagtgatgactcatgatgccgccattgagagtaagagagagactgccgggaagatggggtagaaaagtgaggctttatggcagagagagtggggaccagggaggtggggggacattgtccctctctgcccaggcttgtgctaagaatggtggcaagtgggcttcagttccgggcttctgcagggctgcctgtttatctggccaagattgggatttgaacattgatgtctgaagttaaagcatgaaatgactccagaaatgtcagaatctctatatgtcagagcccaccagcagaagtgatctctgaatccacctccctcatgccacgctatgcaggtgggaagcagaggcctgggaggaggagatggcacccaagaacaccgagtgaactggcctcgcgcgctctggatgggctgtgcgcactctggatggacctaggcctgtgttagggtgaggagggggccagggaacccatgaaggatgtacatgacaagcaaacgttaagctgggagcagtctgttgctagggtgtgtgcgtgatcccaggtgagtgggatgtgagtgggccggagccgtcatcattccaggctttccttccggaaaaggagaaagggccacataggtgggaaccaggggaatattgggatgtgggggaaatcagggggtggcttgagaagaggaggctgttgccaagcagcaagagacatgactgtatgagaacagaacaggcaccctagcgtctgtgggcctggcactgtacagccctggactgtagtggtatcacctccattgcaggggaagaaaccagggcttccaaggtcagagctaggaagaatggagtcaggagtggcatccagggctggaggacttcagagccatgtctctggcatgccctgggtggcagccattccagttcttgtgaggtcctggggtcaaaggggtcaaggaggtactcagcccagggcaagtcatcttttgcttcctttcacttcttctccatcaatctgcccattgagcgggcctgttttcttctactttacccaccccccttaatttgttgatgaaaaatatttattgagcacctattatgtgccaggcactgcccttgatttcatggaacttatgccatcgcttcttggcacagagggctatcccacattgccagggagtgatgggaagaaggaggggagggggccactggccacttctctctccctttacatgagcccctccctcttctcagcctctatccccttgcaaatgcccctagccccagatggttcttgttggaactacctcctgctgaaatgaaaaccagtcagagttaattgttaaacctaatagctggtgagagtttcactctcctgggctggtgggaggggggctgcaccccaggggaggggtggagtcacccaggtttttctggctggtacctgccaccttttccctattctggaatctgcttccagggccctctcctcccctcctccccagggggcaggctgccacctggccctttcccctgcctccagctaaggtgaccctgggaggtgagcactggctctggccttagtccaagggcctctgggtgagtgctcttaggggaggtgtgggggagggcagggtgcctagccctggagacccgtccagaggccaggcagccagtggaccttgctggctttgcctcctgctgggtgtgggtgggggaactaaggatggtgccacagtggcctaagccctgcacacaggaccactgcctgtgcagcccatgccatgccgttccgctctccttcccttttgtcctcttcattgagtttcttattctgggccattctctgccaaaagactgggagatttgggcaccctgagaatagtggcaaaggcttattacttctagaaggctgagcctcggggtaggcccctgccaaagtttagggacagagctcagggttccaagtcagcaggcctagtcaaagctgggtgactttgcgcaggtgacttacctctgtgagccacagcctcatcctctgaacactacaggagttcctattttggggaggtttgaggggtcagtgaaggacactgggtactcagatcccattgtcaccatcactgtgtgggcaccagaggtaaatattaattttaggttcagtagggttttgttgaatgagtagataccattctattcagaggtaagctcacagaggtaagtcaactttaccttcgaggcttagctctgggctagggccaaggaggtcatcagcccaggccctcaaggacttgactgcagagctgcagctgccctatacagcagccattagtcacatgtggctagtggacatgtaaaatgtggctagtgccaccaaggaactgaccttttgaactctgtcgcccaggctggagtgcagtggcacaatcattgcaacgtctgcctcccaggctcaagcgattctccttcctcagcctctggaatagttgggattacaggcatgccccaccatgcttggctaattttttgtatttttagtagagatggggtttcgccatgttgtctgggctggtctcaaactcctgagctcaggcaaagtaatcccaaaggatttcaggcatgagccaccaagcccagccaaattttaaattttatttaatatttaattttatttgattttaactaatttaacattttaaaagaatgctcccttcatttattgacaaactatgcgtgtttggaaacttagatttgagaatatacctttttttttttttttttttttgagaaggactctcgctttcgctctgttgcccaggctggagtgcaatggcatgatctcagctcactgcaacctccgtctcccggcttcgagcaattctcctgcctcagcctcctgagtagctgggattacagatgcacaccaccatacccggctaatttttgtatttttagtagagatggggtttcatcatattggtcaggctagtcttgaactcctgacctcatgatccacctgccttggcctcccaaagtgctgggattacaggtgtgagccaccgtgcccggctttttttttttttttttaaatcataaaggcggctgggcatggtgcctcatgcctgtaatcccagccctttgggaggccgaggtgggcagatcacttgacgtcaggagttcgagaccagcctggccagcatgtgaaacccccgtctctactaaaaatacaaaaattagccaggcgtggtgcacgtgcctgtaattccagctactcaggaggctgaggcaggagaattgctggaacctgggaggtggagattgcagtgagctgagatcacaccactgcactctagcctgggcgacagagtgagactccatcttaaaaaaaaaaaaattgtaaaggcaaggagaagctaaatatcttatgaatatttagcatctgaatcaagatgtgttgtaagtataaaatacacactggatttagaagaggatgtattaaaaaatgtaaaatatctctatagtctttttaattttagttttaatttttttttttagaggcaggttctcactctgttgcacaggctggagtgagtggcatgatcatagctcactgcaacccttgaactcctggacttaagagatcctcccacctcagctagtagctgggactttaggaatgtgtcacctcacccagctaaatttttttattttttgtagagacaaggtcttgctatgttggccaggctggtcttgaactcctggtttcaagaggtccttccacctcagcctcccaaagtgtggggattacaggcatgaaccaccgtgctgggcctatagtattttttacattgattacatgttgagatagatatattgggttaaatgaatatattatgaaaattaatttccctcattcctttgtgctttttaaaatgtaggtactaaggccaggcacgatggctcacacctgtaatcccagcactttgggaggctgaggcaggcggatcgcttgagaccaggagttcgagaccagcctgggcaacatggggaaacctgtctctactgaaaatgcaaaaattagccaagcatggaggtgcgcacctgtaaccccagctatttgggaagctgaggcatgagaattgcttgaacctgggaggcagaggctgcagtgagccaagatcgtgccactgcactccagcctgggtgagagaacgagactctgactcaaaaaataaaataaaataaaatgtagctactatacacttttaaattacatatgtggctcgcattgtatttctatttgacaacactattgtagacagagttgagttgggcacatttgattaataacagaagactacataaagactagttatttggggaaggttgggaggtcaatgaaggacagatattccccacctcaccccagcccgggccttgccccttggtggaatgttaccctggacagccccatagccttgaggatgagttcagggcttcttttttttttttttgagatggagtctcgctctgttgcccagactggagtgcagtggtgcgatcttggctcactgcaagctccgcctcctggattcacaccactctctcacctcagcctcccgaatagctgggactacaggcgcctgccaccacgcccggctaattttttttttgtatttttagtagagacggggtttcaccgtgttagccaggatggtctcaatctcctgacgtcatgatccgcctgcctcggcctcccaaagtgctgggattacaggtgtgagccactgcacccggccgagttcagggcttctgatggcaaatgaaaaaccttggtctgggtcctcatcctggccacgcccttcacttgctctgtgtgtgaccttgggcaattctctttgctgaacttgagcctttcatctgcaaactgagactaatggtggttgaggggatggcctgagaaataatccaagtgagtatttagcacagtgcctggcatgcctaagcagtcaagtatttgctgtgtggtgattgctactactgttagtgcgggggctgttgccacgacagtactgttgcatccagcagctcatattcagttattccatgtgcctcaaggggacattggccagaggggaagaagttaaaatagcttgagggtgggagttgggatggggatttggggctgctttgtatgatacctcaagagattgcttggttttcaggtagctccttggatattcctttctgcaagtgatcaggcaaagataaattccattttacagatgaggaagctgaggcctgtgaagggaaagtgacctggctacacagccggaacctgaatgcaggacattctgcccctgtcgtggtggtattggagccagctaatgccaccattcgaggttgcaggagcagcacctgaccagaaatccagagcttgtaagcaatggttattattagtcttctataactggaaaggatcttgacattgtttttttttttttttttcttgagacggagtttcgctcttgttgcccagcctggagtgcaatggcgcaatctcggctcaccgcgacctctgcctcctgggttcaagcgattctcctgccttagcctccctagtagctgggattacagacatatgccaccatgcctggctaattttatatttttagtagagacggggtttctccatgttggtcaggctggtctcgaactccccacctcaggtgatccgcccgcctcggcctcccaaagtgctgggattacaggcataagccaccatgcccggccttgacattgtttagtacaacggtctcattctgaagtcgaagaaacagagatgagagagacagagcaagagggagaaagagagagagaactgctgatcacatagcaagttggtggccaagctggagctgattctgtttgcttagatccaggcttcagctcagccccagcaggatggatggccctgcttgtcagtgcccttctctcctgcccagtccccagagagggcttctgagaaagaggcttttgtttcatcagctcctcctggtttcctctcaaggtagctacacacatgtgcacacacacacacactcacacccattggccccagtttgcatttgttacacacacacactctcacatcccattggcctcagtttgctttacacacacacacacacacacacacacacacacacacacaccattggcctcaatttgcatttgtccctattccaggtttaaaggaccctgaaatttgaagactatccacacatatctactttctggatatccacggagagaccatgggctttttcatcaaggaggcctgagttcaaatccttcttctatgtctgattctctctgtgaccttgggcaagtcacttgttcttttttgacctcaacttcctcatttgaaaagcaggaacgggaatggtatgtgtacaacctagtggtttagctgggctccagaccccagccgcagtgtaggggtctcagctctgccacttattcactgcctggtcttcagtgagtcatttcatccttctaggtctcagtttccccatctttgaatggtgctgctaccttttggacagttgtgataaggcaccttgctgagctgttcacaggcatcatctcatttagtccccccattagccctgggagcagacacttttactcctattttccaaatgaggaagtaaagtgacttgccctgggccacataagtagtaagtgttagaaccagaattcaaacaggtctgagttactccagagcctaagctcataaaccactgtgtgttcttcctgttcacctgagtttcacattttacatgaagtaggaacacctcatcccacctggagactgactgttctgagtgtgtgagtccagggtgcctgtagcttctccctccaagtctcctgccccattgcatactaagcctgacctgtggttggagctcaaagaagattgagaaaagtacttacatactttgagtgaattacaccagaacaggatgtgaatgctaaaaagaccccgagggaggccgggcatggtggctcatgcctgtaatcctagcactttgggaggccgaggtgggtggatcacttgaggtcaggagtttgaaaccagcttggccaacatggtaaaacctcgtctctactaaaaatacaaaaaattagccgggcgttgtggcgcacgcctgtaatcccagctacttgggagactgagataggagaatcgtttgaacctgggatgcggaggttgcagtgagcagagatcgcaccattgcactccagcctgggcgacagagcgagactctgtctcaaaaaaaaaaaaaaaaaagagaaaagaaaagactccgagggatcactgattccaaccatatttatttcacagatggggacactgaagcaaggaaaggccaagtggacagcagggggtataaccatggcacctgaggaggcatctggaggttggggcccctgctctcccttctccccatacatctagtccaccagcaagttctggggataccaccttttaaatacctcttgagtctgtccacctctttctgtctcttctgcaaccaccctagcttaggccctcatcatatctccgctggataatcacaacaacctcctaactgatgttcctgcagcttcccctgcccctcttccatcctctaccctgtaagccagtggtttctctttgctcttacaataaagagcgaatcttctccttggcctccaaggtccttcgctgcctggcccctgctgccgcttcaggtgcatatttgttactttctattttgctttccgccttgtcacaaggcctttttgtttaacaggttcagcaacttccctaaggtgcctcagagagtcaaatgccagcctctcaatttccagcacatgctgggctcatgaactcctgttctgaggagctaacgctgtttcctccctctaggtgcctgactgacagaagttcttgcccccggggagctggtgtggacagaggaggggtgagtgttctggaggcacagacttattctccttctgctgaggttggacgaagaggtcttccaggccctcggcctctcgatttttgacatatttgactgctggggaagtgtgaggctttgtctacgccacctgtttctggtggcgctgaaaacgggggccatgctggggaccctccctggttttggcttgttttgggttaggggctgaaatgcatattcatcaagctctgtattcaaaaacaggctttgcctctattgctcatccatgccaccgtggctggtgaaggacggtgctgggcctggaagctgccccgtggcccttgcctgcctttgcttcaccactcctaggtcgtagactagattcaggagagagtgctttcatcctggccctgcccgttgactactacatgaccttcctttctactggcctcagggtcacatcaacattggtggatcaggggatgggggaaagtagggtcagactaaatgacttgttttcaaactttccagcagggaactctcctttttccattgcaccccaaagaatctcaatgtacaaaacagctaaaggggttgcagtgtgggttggagttggcgtggggctggccaattcctcagcccccagacaatgcaactgaccttttcttggctttatggaagacactttggaaaccactggcccggggcgtgtcaaagcttcttcccaacttggaggtgctgtgattctggcagggcgagggagtagagagggaactcagccaatggagttacattgattgggaaatttcgaagtaacatgcaaatgtcactgtgatgttattagtaaggcacaattgccagggctgtgatgttgtcattctggagtcctctggtttttaattttggttcaatgtgaagtatctttgtacccctagggaaactttccatttgtgtgtgtgtgtgtgtgtgtgtgtgtgtgtgtgtgtgtgtgtgtgtacacatgtgtgtgcacctgtagggagcgggaactatggggaatgaagtgtggctgagccaggctgggacaggtagaatgaatggtgggcagagctgggagcatgttgctcctgggggtggtgggggtagggggtggctttagctcggttaaaaggagcgatttggctccttcctacaggggccccatggagatctctgggcaggaagcatcgggaacaaggaatcctctgtccacagccacagcacagccggacagaggaggtggattaggagttcccgggagggagcctgctcagcctttccctgacatttgggcaaatgtgtggggagatgcggagctcaaggtatgtgcgcatagggaaggtggggctccgttaaggggaggttgagatcggctcatacatttattccacacgttcctcaagcttcctgaagcctttcaaggagccaagctcagaagcagacaattctgtaggagtcagagccaagaaagatgagactctaggtattaaccaccatcagtttactgaaggagacaggaaatgtgagagataatagactttcacaggcagctgggtgcagtcggagctagttggccgtgtgtctagagccccacattcaagttcttgctctacagtaatggtctcatgacttcccctttctgaaccctcatttctccttctgtagaatgcagatgaacacatccgccctagctacttctcagtgcttttctaagtgtcaattagaatagagtttttcaaatctctttgggcaacagaaacccatattgtaagcatttgtagcagaacttgtctggttctggggcagtttacccagaattttgccctcctcgtggcttagtttcctgggtgcttttggagatacctctgcaaattcccagggctctaggaagcagggtctaaagaccactgggtcagggtattcttgagaacatgctttgaaaactgcccactgcaacccaggtgataggggtggtgccacatacacaagagtagttataatactggcttctgcttggccctgcccatggacagcactgaccttatcttagttagggtctatacaattgggcatggcttttttccagaaaccagtgacaaaaacttaactcaaagtggctttaaaccaaaaaatgactttagtggatcctggggcagttcatgggactgaagaatgaagaatcaggttgactctctctctgccatcactgcctgtctctcccttttaagctgtcctgtgtcccagcttagcaatccaaacagaaaagggagactctttttcttctagaatctgtatgtcaatccaagggaaggactctgagtggttcaatcactgttgctgggaggataggaatattctgagtggccaggtgtgggtcaggtgcctacctatgtagctaacgtaggggcagagctagcaccagacaccgggggagtagaaggctgttggcagaccacgagaacatgctaggatattagtggagctctaggttgtaacagctcataggcctgcagggggctgtaactcccctcttcagttatagtaatgcaaatgccaacaataataacaatagctaatgtgcattgaattactctccctgtaccaggcatgttctattgttttatgtgtattctttcatttaactgtcatgacagtctttgggtaggtcctattattactattatttccccatattatcgatgaggaaactgaggccctgttaagttaaggccacactttgagtaagtaagggagctgggtttcaagcccaaggtgtctggcttcagagaccatgctctgactattgcatctccagcctctgtttggtaggccaagtggccatcttgcctttgcttgtatgcacggagctcacgacttacagaggcagcccagttccaggttgcactgctctgcctgttggaaagggcttccctatgcagtgcacatgtctacctccatacaaatccatccagccagcatatggctgtgtgttaggtgtttcaggagatgtcaagacaaatcatccataaacctgcctgaaaggtcatcatcacaataagtcacattacttacattgtgccaggctccatgctgaactctttatgtgcattatctcatttaattgcagcaacagtccaggtgctgtggctcacacctgtaatcccagcactttgggaggccgaggcaggtggatcaattgaggtcgggagtttgagactagtctgaccaacatggtgaaaccccgtctctactaaaaatacaaaaattagccaggcgtggtggagcatgcctgtaatcccagccactcaggaggctgagacaggagaattgcttgaactcgggaggtggaggttgcagtgagtcgcaatcgtatgactgcattccagcctgggtgacagaataagactgtctcaaaaatataataataataatagttgcaacaacaactccagagagtaggttctgttattgtccccattttccaggggaaactgaggctcagagggaataagtgactaagaaactgcaaagctgttatttgagttcaggtctgcctagctccagagcctgtactacaacccagtgcagtcagctatgtcccctagaggggaatacatgtgtgcagatgtgattgtgacacagtcagcatgcaaattgccactgagagggacaggaaaaatgcaactggagtttagaggagagaggtcagggaaagggggagaaggggacatttgatctaagttgaggggaactaggatttggacattcagttcagggagggatctccaggaaggtttggaagagagaagcaggggtagtgaagtttgggggaaccaaagagctgagttgggggtgaggatgaggggtgttgtggccagctgtgctttcaggccccacagaaggtgccttcttcttccagactgttctcttctgagacgtgaagaggtttgatcttctccaggagagctcaacacaggtgcccatttccttcctttcctcctgatgtgaggtgggcaggccctatctggagggtagacaaggcacctgggcaccaacagctgtcagtgcttcattcccttcttcctggtggtgaatggcaggaaaaatggtccattccccggggatcagcactttctccagacagcacagtgctccaggcaccagaatggctggactagccattcaggagggttctccatgtcctccctggacagcaggctgaagcatatgcctctcacccatggaggggctcctttctcctgtgccctcccttagctaatctcatccatttgtcagaagttggataatgcccccagaggcctgggctctgtccctaaagtgcctttggatttttctccaaacaacacaggtgggaaattgggggaagagtatgatgtagtgctaggtgctctctcagtttcaaaggatagaagaatagcagttatttttcttgagctggactcacagtgagtcaggggttttattaccccattttgcagatgaggaacttgaggttcagaggaggaaaatgatgacaaatgcagttgtcacatgaaatatgaatggctgtgccattgtctgctgaaggagggacataagtgtggagactcaacatggaaaactgccccttccctcccctgctcttgcccaccaattcctcctcctgtggcagtggctctgaaatgctgactctggctaccctagctgctctccatcctctcttctacatggtagcagatcattcgtcctggattgctgcctgcctgagagctggaggggtgtctctgggggactcaggcctcaggaatgttgcccacgtaaggtccagacatccagtatttcttctgtgactcttacagtctctggagtccctggatttctccaatccttcttgaaggaattccagcatttctgtaaggggaaaagaggcagaggacagaagaattctttcataattcttctgtccttaggatccttcaaccccatggcccttatcacctggctcacactagaactagaatcaaagtccttcatattcttttctacaaagggcttttcaatttatcatctcatctgattttccttgtaatcctgagagataaggcaggaagggtataattatccccattttgtgggtgggttaactgaggctcagagaaggtaagtaacttctccaaggttacacagacagagcagggctagaagatagaagccagtgtccaggaatcctgaccttacttctcagtgcccagtgctgacagctactgggacagcctctggctggcctcttagtccctctctacatccaggactccctctctggttcagcccagtgtgggggaggagtcatgtccccagttcagaccttccaggcttcctaaggcctccagagtaaagcctcactcaccacttctgtatttgagagttccccaaatccagtcccaatccactgctcttgccaatctcagctaacataacaggctagtcttttccttctgacaaagtagacaagattagccatttgttaggggggcatccctctgtgggatgttggatgaatgggtttcagcctgcttgctgctgagggaatagacagggaaactgaggcaagggtcagcacaatcgctgcattcaggacagcttagagaggcaaggctaagaaaaggcttggactggactaatacgatgggcctttccccaggaaaatctactgctttgtttcattaaataaaacacagatggtgcgtgcctataatcccagctacttgggaggctgaggcaggagaattgcttgaactgggacctgggaggtggaggttgcagtgagccaagatcgagccactgcactccagcctggactacaagaacaagactccatctcaaaaaaaaaaaaagaaacacagagtgtactgagtgcctatcttttgctctacttctatcccagagaatatcttccaaggggcaccttaagctttgtcagaaaagtagcacctgggccaaaccagaaccagagacccaggttcctaaggagcattggagtttacagctcagcacttgccagaacaactgggattctggaattagtgatgatgattgcacaactccgtatgtaaatatactcaagaggagtgaattgtatgctgtaaagtggtacattttatggcgtatgaattatatctcaatttttttaaaaaagaatacctgggattatattagagcatgccctgcacatgtaggtgcttaatagatgcttaatagatatttgttgaatgaatgcattaatgaatgtaaatttatttatttattttacttaaaaattttgttttgatataagaacatcttataaagcacatttgtttgatcctcacagcagctgtaaggaggacttagggcaagaataatgatccccatttaacagataaagaaacagaggcctggaaagatgaaatgacttacctagggcaattgaattagagttttagagagttgaaataagtttttatgctatcttctccagcccttgattcattaagcaaaccttaaccaagcacttcttctataactgagctatccctgagatgctgagatactgatatcaatgtgacaagacctctctcattccccagtagttgagagggagactgggatgaagaaccaagcactgacatgactaatcacacatgactatggtgtgattagtactgaagggaggtgggctcaggggctgcaatgcccaaaggggctctggccagccctggggagagcagggtgactgccctggaggctgacagctgactggaccaggaaggatcagaaagatggccaaaagaaagggcaaggtgtggctgggtgtggtggctcacgcctgtaatcccagcactttgggaggctgaggtgggcagatcgctggaggtcagtagtttgagaacagcctggccaacatgtgaaaccccatctccactaaaaatacaaaaattagccaggtatggtggtgcacgcctgtaatcccagctactcaggaggctgaagcaggagaatcgcttgaacctggtagggttgcagagagtcgagattgagccactgcaccccagcctgggtgacagagcaagactccatctcgaaagaaagcaagaaagcaggaaggaagggaagggaagcggaggggagaggaggggaggggaggggagaggaggggaagggaggggaagggaaggaaagggacaaggtgggcagggtagggtatcttcatgtcagtccagggtgcccttgaatcctgtgatgagattagggctggctttgattcagaagaacaggaggagtcactgatgaattttaagcaggcgaggaacaatgctagattgcccactgccctccatccagggcaagcccatttcagccctttcttcaataccactctccctgcccgccctcctcctctgtaccctctgcgctggtcacacggtgagcctgatagaggtgaacttgagcccaggggtcctctctcccagaccaagctagtccttgcttcatcactccaagtagccctcctcagtctgagtccacccctgacattgctgttctggccttcagctgatcacagctagaaactgtcggtaacattagcactaagcgctaataaccattaaaacagatgaccatttaccaagcccctactctaagccaggcgtggttataagtgattcatttctgtatcacttaaagtcatttaatcctcatcctaagaaatgggttatagtataatccctagttggcagatcaggaaactgaggcacggaaaggtgtcataatttgcctaagtattggtgaagctgggattcaaaaccagaggctgtgctgagtcttatccgctggactgtagagcacacaggaggaaaagggcagtcagtccagctgaagactgagtgagcaaagagggactggtccggtgaacttggcaaaccacagaagcacacacaggccttgaagtccatacattccatgtgacgggcaatctgccttttgcctttgaatctaggatttctgaagctctaggccaaccgtgtccctgtctgtttgatgtagcctggctggagcctgagccctggacaaccagattcatattttctctctcatctgtttctctttctcctaccgaccaccccagtgcttgggcctagaaatggattctgcctccagctgctcctccactgggtcctgatttagtccgcaaatttttattaaaaactccaattttattggagttcctaccatactccaaacactgtcctatgtactgggatacagaggcacacatggcaggtaaacacatgctatggtctggatgttagtgtccccttataatttatttgttgagatcctaaccgccaaggtaatggttttaggaggtggggcctttgggaggtgatgaggtcatgagggctccaccttcacgaatgggattaatgtccctataaaagatcccagagcctttggtagttcatgagcatgatgattgggtgttcacgcatgggggtgagatgtgccgccttcaaaccttgttacaatgtacaatgtgaacgcattacctgtctgacatgaaaaaaaaaaaaaagagagcgatctcagagagctagatttcctttctaccatatgatgactagaaggagccatctctggaccagaaagcagccctcagtagacacggaatctgctggcaccctgatctttgacttctcacaaaaatgtgagaaacacatttttgttgtttatgagccacccagttgatggtgtttggttatagcagcccgaaagcagaacttcatatcgttctctggcatttcccaaggggtagtgacaaagatgtctcttggttcttccatgggatgcatgattttgaatttggaaaaatacctctgttgggggaggtagcatgtgctgggagcccatgtgctgggggtcaggcttgggctgtgatccttcctcttctgtggccatgctgggtgaccttaggctggttcttgcctctctctggtcctcttcctccccatctaccaaaaggggagatgagaacagtccctggcatttgtggggcatttgcctggcctatgtgtcatgtgctcacaggagcccaggctgattccaaggtcccttcctttctaacatttggttcctgggtctcacaggccctggaagtgaccactgggctgagtagctcatcagcttccccacactgaagcccgaggggtctcctgctggcttctgagagctgacggaacaggttccagcaaggcagaccctgacacagaagccagacctgtccagcagggaccccatacactggtgggtgtaacctcttattatttcctttgggcaggaagtggggaaggctggagtggaggtggagtgagagcagaccttcaaggcccctgaaactacgcacttaacctagttctgccttgtgaagggtggtgaaaccaaagcccgagaagggcagctttccccaagactttgccaggtgtcaccaaactatgctggaacccagatctactgatccctgcctggtgtcgtgtgctcagctgttcctgggccttgctcacggagtaggggagggcaaaggatagagcgtgtgtgcacctggccaggtggagagtggccacattttatcccgatgctatggttgtggggggagaagtgtctccatgtcatttgtcatgtttccctgcctcctgtcatgtttctcagataagttcctgggtctcttgcccaactgacgcaaacagcctataggttgagtgtccagaggagggggcgatgcagagggccggcctttgtgccaaatggggacaggaggcctggtgagtcctgctgtacaccattcctggtggtggagccgctcagctgtgagcgcccatcctttctctgggcagtggccatgtggcctaggctagcaggccctggaagagcctttctgtgtccttcctggttcttggtgtctaccgcctcacccacacccctgaagctctgggctttgctactcagctctggcacagagactggtttggcaggtttggccacacccatgagcagtgcgatggctgggagctggggtggagcaggcctgaggaggcagtgctgccctgtccttacccccatacccccaaatcccagcctcacttctgccgccttttctacctttctcaagggaggcttcctgggaaactggaaggcagaagccacgcagacttctagtcctggttccactgcttactcggtatgtggcccttggccagcccctttcccttcttggacctcagtttcagcacctgtacaatggggctttgggctcagtgatcctcagacagccacgttgtatgattctagttggggttctacgattttctctccatccctgaacaaacgatagagcactgactgccacaggttccacctgggtaaaatgagtgcctcgacccttgctcgcttcctggagatgtcgataggatcagccaacatcctagcaagcatccagtctccatgggaaagttttctttctatagtctggcctgcccttatctggttcaagcagaaggagagaggatacctagagatggggctttctctaggccccctcccatgctccacttaccctgagaccataattgactgagaaccaggctttctgaacgtctccatgatcgggggggaggggcagaggtagagaacaagaatacagaggaaaggccctcgcacttgctgcctcctgttcctcccgaccttcagaccagcccagggtctagtttgggggaagaggggaaggcagaaaaattccaccactgctacaggccccctctgtgacactgggaaaattgtgtactttcgctgcacctcagtttcccgatctaacgaggaagacacatgtcttccagatcacatgtcctcagaaaatttaagttctggtttttttgtttgtttgtttgtttttgagacagaatctcgctctgttgcctaggctagagtgcagtggcgcaatcttggctcgctgcaacctccgcctcctgggttcaagtgattctcctgcctcagcttcccaagtagctggtattacaggcatccaccatcatacctggctaatttttgtagagacagggttttgccatgttggccaggctggtctcaaacacctgacctcaggtgatccacccaccttggcttcccaaagtgcttggattataggagtgagccactgcgcttgggcagaaaatttaagttctgacaatgtataggtcagaagaaggaatgggagttagatgaagaggacattcccagcctgagatgggggctagagagagaagaaaaagggaattaacattcagtgagcacctatgtgccagtgctatgccaattactttgcatacaatacatacaccatctatattcccaagtctcctttccaagtggcagccagagtgaactttgtaaaacacaaatttggctgggtgcagtggcccacacctgtaatcccaacactttgggagtctgaggtgggcggatcacgaagtcaggagatcgagaccatcctggctaacatggtgaaaccccgtctctactaaaaatacaaaaaaaaagaaattagccgggtgtggtggtgggcgcctgtagtcccagctactcgggaggctgaggcaggagaatggtgtgaacccgggatgcagagcttgcagtgagccgagatcgcgccactgcactccagcctgggcgacagagtgagactccgtctcaaaaaaacaaaacaaaacaaaacaaaaaacccaaaaaacacaaatctgactatgtcactcagtgactttcctctgcccttagaataaaatctaaattccttaccatggcgttcagagccctgagtgagccggttcctgcctcccccttccagccatctatctctattggtctccatagatcattggaaattattctattggtcatttccgtcagccacaggagtcttctctgttcatttagcaaatttattccagtctcaagacctttacacatgcttaggttccctctgcttagaattcttttcctggctctttgccgccttggctccttcttatcctctacgtcgcagtttaatttagtcctcccaccccctgcactgcttttttcaccacctcttgattccttcataatgcttatcacaatttgtagctatttgtctttttcttttaatgtcatgttcactcttgattccatgtggcatggcgcacagtaggtattcaataagtatctattggatgaatgaatgaatgaattgtaaggaaatgagagagtgctggttgagtgcctggcatagggtatggctcttaggaggtgctcaataaatggcagcttttagtgagaactgacatggcagagaaaataaatacccactgatagattgcatacatggtgggtaggggaggcagcgggtaattaagattggaaagtgatgcactcgtgccagatcttgggggtccctgatgctcagccaaagagtttagacttcctgaaagagtagctggaagtcattgctgggccattaatgtaactataaagccctacttctaagatgtgggctcagccactttgcgtactcaaggggctgtgctgtatggtggtggggttgcagggttggggacaaacccagagagagacaggctgggaacctttctggtgtcattctctgagacaggctattcctacaggcccagaaggaggggacacagttaggagcatcctgtgttttctgattccacatggccattacattgtttctggggagtggaggataggggtgacctaagagtcagatgcttggatttctatttgagcccctccccttatcaaccgtgtgacttctgctaggttcatttgcatttctgattctgtttcttcatctgtaaacaggctgctgttcgtacctgcctcatggttttcttggggaggatcaatgaggtagaacctgcaaagggcttagcagagagcctagcacctactgagcgctcagtaaaggtgagctattatcttccattcaacagtgggggattcagaaaggtagattgaaccacaagtgcacagaggcatgaaacactttggagtggcaggagtttcctgtgtgtgttggggacggcaaggaggcaagtggagtggcaggtgggtccagctcctgcagcccgtgtatattgaccaggagctggcactttatctggagagcgatgaagacactgcagggtatcaggttgggaatgatgtgatctgatttctggcagtgggaggatgaattggaagggtaaggctggagaccaggagacggatggtagtctgttggtgtggcctggtgagaagtgatgggcttcatctcaggctcatggaagtgtagaagagggaacagatcacagagtgagtagagacagagaacggacagtgtggggccgatgggtcttggggaagggagggggaagaaaggaacttgtcctagatggctgcagactttctcgatggggggctgacgagattataaaaccgaaagtatggacagtgcatgtgggttttgatgcctgtagtttgacttttctgggaattcagtagctccctgagaaacctctcttttatctgactctctgtgtagaaaatctttctaaaatctctgaatgatgactcctccattagggatgaggaaggcctcctgtggggacaccgtgcatacctcctaaggaggggtggcagcttggcctcctttggtggtaacaaagctggggattttatttggaagctgtatttcagagtctatcagttttcttgtgattttcttcaaagcatgtacaaaaaggcagttccagttagtggaattttttttttttttttttttgagacagagtttcactcttgttgcccaggctggagtgcaatggcgtgatctcggctcactgcaacctctgcctcccgggttcaagcgattctcctaactcagcctcccaaatagctgggattacaggcatgtgccaccacgcccagctaattttgtatttttagtagagactgggtttctccatgttggtcaggctggtctcaaactcccgacctcggatgatccgcccgcctcggcctcccaaagtgctgggattacaggcgtgagccaccgtgcctggccagtggaatgttttgtgtatttattccacggctctggaccaagactaggcaacttttcaagagtggtgaaaggtaagctcctgcgtgctccctctctctgttattttcttgattggtgtggactggaagctcacattccagagaaacttaggtcttagattacccgtctaattttccttatggatgggaacaagagaaggtgcatgaaagttgctcatgattgtgaataatgccacagctgggcttggcccaggcacctcactggcagctacaggctttcccatggcatgcagctggcactgcctctggagaggaggataggggtgatgaactgatgaacatcagcacagcccccggcccatctcagaggcacacacctagtggcagcgggagggcccccgcagactggagaggactcagctattattgtcctaagcctctgacagtgaggctcatccataccccgcctcccatctgagatgagctcagagatatgactgaagtttcagggctaaaaccaaagggattgggttggtacccccttcttatgagaaaaggagaggagagccctgtctgggtctggcggaatacagtctgcatccccaccccagctgattgcagtgatgaggagatgcctttgtctgagttgccaggggaaccaaagtttctgccttcttctaaggccctgattggctcctgctggagcttaagctttggtgaatggaagggcctctcttctgcctacaccttccctgaggtgagagacgagtaaggctggagtccccatggatgcactgtgttggtgtctctgtcctacctccttagctgggggtgctggatccccttgctcattcgtctttcactaatcctgggcagcatctgccccaggcctttcatccttctaggtccaggaaagctagcctaagaatcaggaaaactgtataccaatcctgacataggcagactcactcttggccttgggcaggtctcttctccctgggcctcggtttccctacctgtaaaaatgaaggcattgggctaaactctggtccttccagctctgacttccctgaccacacagcccagatcccctctctgaccttccatggccctcctcgtgcctcttgtgtgcctctgactgcattctctctcgtaggttcccttgtaagatgcaggtcagaatagggggttgtaaccagccttgagcattgttttggttttctgtaggaaaaattgtgctccctgaagcctgtcctagaagccctacatcctgcaacccctcttgtcctcatctgtctcacctggaccgagccccagggtcagaagcccgggggaacgaatgatgggtgcttgtgtctgttgcagggtggggctaggcagtgtgcagaaaggagcatgtgggggtgggcgggggcagctggaagagccctggagctcagcagtcctgggttccaggcctaatttgtctacctgctggctatgtgaccttgggagggtggctcagttgcagtctccccatctatcacacaggaataataatgccacctcacagggcttgttgccaagatgacatgtctgccatacaggagacaccaagttcccttccctgctctctcttctaaacaaggcagggagatggggaaagttcagactgaggaggggccctaggctgcaagacctgaggtgccccaggccgggccttagatgctgctcattcctggcagtgccaaaaagcagggagaaaaaagtattggccttgggtggatgggggaggctgtgtgtcagagctaatgtttaaataacacttttaagatcctccagggacctcaaatgaggatttttcagatgagctgaaaatggagcaaagtaatgagactgagctcactggcaggaaagggagcagccttaattggtactggccctgccttggccccgtgacactcattaccacaggctgcccaggaggatgacccgtgcatttgggctgtaagcaatgtcaatttcttagcatggggtgatggggttgcatctggtagtgactcagccctgcttcttgtcgactcaccaggttgagggtcagagaggacttcttagttggccttcagagcctggtttagtttttagctttgtgacctagcctctctccacctctggggtctagaggcagcagccagacctggccactgtctgtcacaggtgtggtgggaggcagggatgggatgttgaagtcaggcatgagttgctgggggaccttccctcctttgctgaggtttgcctggggtcctggatgaggtgggtggagagagggaggaaggggcattctcagaagaaaaaaggctggtgggtgtgtgggtgggtgaatttgtgccaatgagatgtgactctctgggcaagcttgtgtagcttacatggaggaggcacagaatctaagggacatgtctcaaagaggctgagggatgggcctaagaagccagcatgggtgggggtgaggggtgggtcctgggagtggtttggtttgcgagtccctgtggaaacacaggtggtagaattggtgaatggtatggaccaagagtcctattctgaagacaccagaaaattctgaccaggctcttgtacgtgaggcctcttctgttttgcttgggctggactgcggggtgaatggccacgggtgtggtaagttaccgcttctcctggggggagcctggtttgcattgtaaatactgctcctggagccactggtcatggtgggggcactttttcagacgccttcctggggaatgtgtgagggccgattgttagatcattcttggcacctggtttgcattatgaatgcagttgggaggcataagggcaagcattgggtcactagcgggtcccaggccaccctgaccccaggctcactgctcccgaagcactccctctccttggtctctgggacagcacaccccactttctggctttctcactctggcctgccctcatttgcctgttgctgctcctctccttaactgttcagtgtgtgggttcctcagggctgcattgcagttattgtcgtttttaaaataataccgttttttaattttaaaaattcaatttattcatttattttaaaaattacaaatgagagctcattatgttggccaggctggagtgcagtggcaactcacaggtgcaatcacagcctcaaactctttgactcaagggatcctcctacttcagcctccagagtagccgggattacagagtgtgccactgcacccggcaggtttgttttttttttttgttttttttttttgagacggagtcttgctctgtcactcagcctggagtgcagtggcgtgatctcagcttactgcaacctccgccccccaggttcaagtgattctcatgcctcagcctcccaagtagctgggattacaggcacccgccaccatgcccaattaatttttctatttttagtagagacggtatttctccatattggccaggctgatttcgaactcctgacctcaagtgatctgctcgccttggccttcgaaaatgctgggattacaggcatgagccaccttgcccagcagtgtttttttttttgttttttttaattaaaaccataataacatagtaccaagatttgggaaaacaggaagcagaaaaaaattactcctgaatatgattgggagcttggagtgtttcctttcaccagttttcctttgctctttcttgcacagtcataatttctaccgcatcatcagtactgtcctgcatttttctcttaatgttgtatcggaagctgccttccgtgtcgttactgaggattctattaaatacacgatcaactcatcccttttcctgctcatggatattccggctgtttctagtttttgctattatgaataacagtgcaatgaacattgcataaaatgttcttcctgtatttcagatgatgatgtctcttggggtgaagacccaggaagagaatgctgggtaaaaggctgtggctgccttagaggctctcagtaaacttgccaaactgctatgccaacctttaacccccagcatccagggtgaatggcaggaactgttttttatttttctctctctctctatttgatttttaaaaatttctctctctctctctctctctctctctctttttttccccgagacagagttttgctcttgttgcccaggctggagtacagtggcatgatctcggctcactgtaacctctgcctctgggttcaagggattctcctgtctcagcctcctgagtagctgggattacaggagcccgccaccacacccggctaatttttttttttttttttgagacagaattttgctcttgttgcccaggctggagtgcaatggctcaatcttggctcactgcagcctctgcctcctgggttcaagtgattctcctgcctcagcctcccgagtagctggggttacaggcatgtgccaccacgcccagctaattttgtatttttagtagagatggggtttctctatgttggtcaggctggtcttgaactcctggcctctggtgatccgcccgcctcggcctcccaaagtgctgggatttcaggcatgagccaccgcgcctggctaatttttgtatttttagtaaagatggggtttcaccatgttggccaggctagtctcaaattcctgacgtcaggtgatccacccaccttggcctcccaaagtgctgagattacaggtgtgagccaccacacccagcctgttttttatttctcttaggtctgaagagcctgttccttgtgtgtagggactgctcccaactgtcctctgtccatgcattcattcatcctaaggcgggaggcagaatagggctgtggtgtcaggctgcctgggttcaaaccagcctcccctcttaaccaccttgtgtccacttcctcagctgtaaagtgaacatcatgacagggagctacctcacagggtccctgtgaggctttctgtgcatgaaagcatggaagacacttgaaatactacggtaagccaggatgacaatggtcaggcctagagagaggaaggggctgatctctcaccacctagtgatgcaggggcagagctgaggccagaatcaggcttcctgcctccagtgctctctttccctgatgccaggctactgctgtggatggtgtggtttatggcgtaggtggccctctgttcaagaatatgtgggaggggtggagggcctggatggatctataaggtggggtctctccctttcctcccagagccgtcaccttctttctggggtgctttcccccacaaagttatctctctaggttagagcttggggccccagctcaggcctgttccccagaggtatatccaggggacatctggccccaaggaatctccctggctagcccttgaggagggcgtttcagtctggagggaaaggtgagttctgaggacccctccctaggtgactgtgtcagtttcctaatgctgccctaacaaatgaccatatacttaaaacaacacaaatggatgaccctagacttctagaggtcaaaatctgaaaatggaccttatggggccgaagtcagggtgttggcagagctgctaggggaggatcctcacctggccttttccagctctccaggccacccacatgccttggttcatggccccttctagtagctgggtccctcccacctctgcctccgtcatcatatctcctccgattcccccaaatccccttttgacttacaagaacccctgtggttacattgagcccattcagataatctaggaccattctccatctcaaaactctttacctaatcacctgtgcaaggtcccttttgccacgtgaggtaacatattcacctgattctggggatgaagacatggacatctttgtgggcggggggggggggcgcattattatgcctgccacagcagccagtagcaaagatctctctggattactggacccccaggtcctgctggaattgtaccactagcctccaagatggagggagggcttgggggtccaggcctgatatgctgtggccggggaggggtatgagagattctgtatgatggggggcccggaaggaaggcagtgcacctgtgatagtgtgataaatgtgttcagtgaggcagacattgggaaatgtcacccctggccttcagaggtagtcctggtaggtgtgggacccactgtgaggcactgccacagaaagccaagcagcacccgctccacacaccaccatcactgctgtgtgtgtacacgtgcttgtgggtgtgtgcactcatctgtgtctctgcatgaatactcttgggagggccaaggaacaactcttgaaaaaggtcctttctgctcttgttctaagaaaaataattacacaagtgactaattttatccctaatcccataattactttattatgtagctggtgagagggcccgagctgtgcctttggctccactctggctgttagcccagttggcctggtccaccagcgttgagccccgccttgtttctggcctgggactgccatgagggcaagatgagttccattctggctgagatccaactaccctttggtatttggggtctgaaaagaccaccatttcttcccaccaagcccatgcacaaagtaagagcttgtgtttagggaattaagtcagtagattcaagagatctgggttctagttcacccctctcattaacttgctccctgaccttgagcatgccatttccctctggatctcagatctgttgtctgtgatacagggccctggccagcttaacactccatgattccatgaggagaaatgggaagactagagctttgagacagaggtaccttcttgctacctgctgaaaacataccccaatcatagcattaaagataatattaatagtagctgggcacagtggctcatgcctataatcccagcactttgggaggccgatgcaggcgtatagcttgagctcacgagtttgagaccagcctgggcaatatgcaaaccctgtctctacaaaaaatacaaaaattacctgggcgtggtggcatgcgcctctgtggtcccaactactcaggaggctgaggcgggaggatcgcttgagcctaggaggttgaggcttgcagtgagccgagatcacgccactgcattccagcctgggcaacagagtgagaccctgtcaaaaaaaaaaaaaaaaaagtaacaataatatccatcattacttgatagcaaaccttgtacctgattcttcatttatatttttctcattctatacttggatgactaggtgaggtaggttttacggaagaggaagctgaaccagcagttgataaagtgactcacctgtcatgaaatggcagaggtaggactgtagcctatgctcttagcctctgcctccattgtctttttctactgtataaataaatgaagggccactcagctaggaagtggcggggctgggatttgaacccaggtctgtctgtctccaaagttcttgccacctcccagaattaggcttccaggggtgattatactcttgaacttcaaatatgtaaacttaagcttgacacaacaagaaatagcgatggtgaaataaattggaaactccagtagaccagagagttggtagcccgaggttgtgttctagctttgccactggctcacgctgtgaacttaagcagatccccactaatccctaggcctcagtgttcccatgtacacgaggggtgggattcgatggtatccaaaggccttcctggtattgatggtttgacattctaggccatctggtcccagaaggtactgtggggcaggagaccagctcatggtggagaccaaagggtgggtgagttggcagccctagttttttctattacatttattcccacgagaatagagattgcttggactgtgtcccactgaacatttgcagaacaacttacccaggccatggagttgagaataaagagtggaggaggtagtttccaggctgttcctgcaaggttactgcccagcctgggctattagctcctcaggggtccaggtctgtcatctaccttgctccaaaggctgcattggtctcaggtaggcagaagcaatggctgcacgtctgtctgtgggagtctgtgagggtgcctaagcataataaataagaacactattttgtgttttctctgtctttttttttttttttttttttttttgaaccagggtcccactctgttgcccaggctagagtgcagtggcttgatcacggcccactgcatgcaacctccacctcctgggttcaagtgattatcctgcctcagcctcccgagtagctgggattacaggtgcatgcgaccacatctggctaacttttgtatttttagtagagacagggttttgcatgttggtcaggatggtctcaaactcctggcctcaagtgacccgaccacctcggcctcccaaagtgctgggattacaggcgtgagccactgcacccagcctactttgtattgtctattatcacggcctgcaacccactttccttgaaatattacgtttacttctcttaaaaccatatgaggtatgtatatggtcattcccattgtacagttgaagaaactgagactcaaaaggttaagtactttccttcagatcacacaatcagtgagggatagagggggatttgggattctgcctccagagcccacggtcttggccttagggactgataccacatgggccgaagcaataagcatgaggtcaggagtcagcgggtttggaatcccccctctgctcaccatctgtgtttccttgggcaagttactttatctgtctggatttccgtttctctctccataaaatgggtatattaatacctgccagttgggattgatttaaaggtcactgagatgatgggaagtgcaagtgtctagcctgtgggctttcacctcttgcccctgcctccttcctgcttccctctacatatctgaggctctggccaccctggaggtctcccacgcatagctcttagcttaggcctttgcacaagctgctcttctgcctgaaagttgctgtctctgcctgttgttgtaaagatagacttccttcacatctagacttcgatcctttactgtttccttgaggattctggaaaggggaaggggtgaggtaggttctcccacaggcctgttcagtgattatcaggacaacccctcggtaggggcagaattgagggtagcaggtagggtcctgaacaccctggaaatataaatccctccagaaaatttcctccctttatacttgacagcttaggaagggcgtgcatatgaggtgagtgtttcgtctttggatcattaaccttcctattactgtggtctcactttttcagttccccctatttctttggcatcatctcatggccttttactttcttgtttggttttcttgctagaacttacaaaaaaattttcaaaattgtggtaaaatatacagaacctaaaatttaccaccctgaccacttgttttttgagggagggtctctctctgttgcccaggctggagtgcagtggcatgcccttggctcactgcaacctctgcctcccaagctcaagcgatcctcccgcctcagcctcctgagtagctgggactacaggcacatgcaactgtgcccggctaagttttttttttttttttttttttggagaaacagggtttcaccgtgttgcccaggctgatctggaactcctggcctcaagtgatccaactgcctcagcctcccacagtgctgagattataggtgtgagtcaccatgcctggtccatcttaaccatttttaagtaagtgtacacttcagtagtgttgggtaggttcatattgtgtaacaccatcactaccaccatcttcagaacttttaaatcttttttctttctttttttttttttagagatggtgtctcgctctgttgcctaggcctgagtacacaggtgcaatcatagctcactccatccttgaactcctgaacttcagcagtccacctgcctcagcctcctgagtagctggggctacaggtgcataccgtggtacctgactaatttttttttttgtaaaaatggggttcttcttttgttgcccaggctggtcttgaactcttggcttcaagtaatcctcctgccctggcctcccaaagtaacgggattacaggtgtgagcctgaattttttaattttttaaaatttacttttccacggcagagtattgttctgttgcctagactgaagtgcagtggcacgatcactgcagccccaacctcccaggctcaaatggtcctcccatctcatcctcccaagtagctgggactacacatgcatgccaccatgcctggctaagtttttctttttttccttttctttcctttccttttttttttttttttgagacagggtttcactctgttgcccaggctagagtgcagtggctcaatctcggttcactgcaacctctgcctcctgggctcaagggatattcgcccctcagcctcccaagtagctgggactacaggcatatgcactatcacacctggctaattttttattttttgtagagacagggtttcatcatgttgcccaggctggtctcaaactcctgacctcaagtaatccgtatgcctcagcctcccaaagtgctgggactataggcatgagccactgcgctggggcagctaattaaaaaaaattttttttggatacagattgggtctcactatgttgcccaggctggtctcaaactcctgggttcaagttatcctcctgcctcagcctcccatagtgctgagattataggcatgagtcaccgcacccagcctgaatactttttttatgttttgagactgagttccgcttttgttgcccaggctggagtgcaatggcgcgatcttggctcacggcaatctccgcctcctgggttcaagcgattcttctgcctcagcctcctgagtagctgggattacaggcatgcaccaccgtgcccgtctgattttgtatttttagtaaagatgagttttctccatcttggccaggctggtcacaaactcctgacctcaggtgatctgcccgcctcggcctcccaaagtgctgggattgcaggcatgagccaccatgcccagccaaattttttaatatgaaaaaagtgaaactatatccattaaacaataactcccatttcctcctcccccaacctgtggcagctgccattctcctttctgtaactgcaaattggactagatacctcagataagtggaatcatacagtgtttgtctttttgtgactggcttttgttacttagtataatgtcctcaagttcacccatgttgtcatatgtatcagaattcccttcctttctaaagctgaataatattccattgtatatatgtacaacattttgtttatccactcatctgtcgatggacacttgttgcttccacctcttggctatgtgaataatgctgctatggccttggctgtacagagatctctttgacaccttgctttcaattattttggatatagcctcagaagtggaattgctgggttgtatggttagcactttttttttttttttttttgagacaagagtctcgctctgtcagccaggctggagtgcagtggcacgatctcaggctcactgcagcctctgcctcccaggttcaagcagttctcctgcctcagcctcccgagtagctgggattacagcttctccaccccgcccgctaatttttgcatttttagtagagacagggtttcaccatgttggccaggctggtctcgactcccagcctcaggtgatctgcccgcctcagcctcccaaagtgctgggatcacaggcatgagccaccacatccagccagcacattttttaaagccactatttattgcatgcttaatatgtgccaggaactgggttaatgatttgacatatattgcctcactcaatccctgcgtccactctgagtagtaggaagaattatccccagtttgtagctgagaaaataaagactcagagaggttaagttatttgctcaaagtctcacagctaggaagctttggaacatgcactggagctttgacctgccgccaaagccttgcttttaactattgtgacatgctgcctcccagtggcctctctctccacctgtctatagaattttctgcctctgttgtgtcccattttttttttctctcttgccttgtgtgtgttcactctctctggaaactttgaacaacttaagtaaaggccctttgactgccaagaagttttgtgagttggaaacttagagcgggaggcctgtaatttgctttctaatcatggtcctctggatttatagctgcctgtctcccagtgactgacaggctcttattcagcctcttgtggtgattgccttgtggatccacagaaagccggcccaagagggccagcttcctgggtacagggacgctgtacccccagagaggcagtgtgggaagggagacggcccggctaggccaacgaggattctcttggctcactgatttcctagcaacaacagaggcagaaaattttacagaaaggtgggaaaagaaaggctatgaagtagattccagtacaattgcctttttctgattttcaaaactatcagagcaaaaatattcctaaatttgtttcgagttttataagttcaagccagacttacggtttgcatgatagtcagttatctttctgtcatcctttaaaaaaaatttttttgttatgcaaaatttcaaacatacataaaaataaagagtatagtgtaatgcacttctgtgaacccattgcctaggtttagcaatgattaatacatagagtcacagcttgtctatccaataacacagaagtttaaatttttcctcattcacagcactagctcagcgcttcagacctagttgttgctcagtaaataaatagatgctgactgattacaaagcccttcccctctctgggtctcagtttccccatctgtgcagtaaagggataggattaagtgctttcttcttattattatttatttattttttttaagacggagtttcactcttgttgcccaggctggagtgcaatggtacgatctgggctcaccgcaacctctgcctcctgggttcaagcgattctcttgcctcaacctcctgagtagctgagattacaggcatgtgccaccatgcctggctaattttgtatttttagtagagatggagtttctccatgttggtcagctggtctcgaactcccgacctcaggtgatccgcccaccttggcctcccaaagtgctgggattgcaggcatgagccaccgtgcccggcctaggtggtttttttttgttgttgttgtttgtttgtttgtttttgagacagagtctcgctctgtcacccaggctggagtgcagaagcgcaatctctgctcactgcaacctctgcttcccagattcaagtgattcttgtgcctcagcctcctgagtagcagggactacaggtgcgcgccaccacacctggctactttttgtatgtttttttttttttttttttagtagggatgaggtttcgccatgttggccgtgctggtcttgaactcctggcctcaagtgatccaaccaccttggcctcccaaagtgctgggattacaggcatgagccaccgcacccaaccaggattaagtgctttctaagagacatggtagtcaaagtatacacttggatgtcagacacaattgtttttccatttattagctaggtatcttcaggcaagctgagtctcagttttctcatctgtaaagtggggatatgacttctcaagggtggttgtaagcactgaataaagtagctgttttgttgctaatacttttattattgctattttgaatattaatattctggttggaagaatccgtgtatttcagaaatgcaaaaataaaattggaatggactagaattcatgccctaggatttggcttctttttttgtcccagtcagcagataatcagaagcccaagaaatgaatagtgcaagaggaggcccagagtgagggccatccaggctgatttcatctcctctcttcccctgcccctgccgtgtgtgggtgtcacagcccccacccccatgagagagcccgactagccaccccctcccctaatgagacaggcccaagatggaagagcccacaggtggagagggtggtgctgcaggatgtctcgttgctaagatttccgaggaggcagcaagagcctgtttccaaagctgggagggaatgatgggctgatgagtagatgtagggcatgtggccccagatggggttttgtgggattctgggcaagggacagcagctgggagaaggcgctgggggcaggaggagggtctttgtagaatatggcccctttcatagactgtgggctcaggattacgtgttcatttcttccatttacctccttatctgtcaatatcagacctgcatgtgaatcctgattcactctatgacctttggcaagtgttgtgctgctgtacttgctggccctcagttttctcaccaatgggagggctaagtgaaacatgtataataaagtgctctgtaaaaaggaagacaaagtagaaatgtgaaggttcactacgactgtcatctttattattttttttttcttttactgtcagatgagggaatgggactctgttaggtttctatgcatgaatagggagccctggagggtacttccgctgtgagggcctgtgtcaggagactgtgggaattggctagatgggccccattagtgaaactccagggaacaactgaagagggcagcaaagttcaaagccagagaggcagcccaaggggggctgtggttgctgaaaggtgggggctctagtgagattctaggagggaccttcaatggttcaggccagaagctttgagagaggtgaaggtaacagacctttcttatataaatatgtttacacatatataccagaaagtaagcaacaaaacaagacccaaatgtacacaaaagaaataattccactatcataaaacaacgtctggtaacatgttttaaaatatttcctgtttgcttttttctaggcatgtacacatacatacatattttatagaaattggggccaggcacggtggctcacgcctataatcccagcactttgggaggctgacgtggacagatcacttgaggtcaggagttcgagaccagcctggccaacatggtgaaaccctgtctcttctaaaaatacaaaaattaaccaggcgtggtggcggggcacctgtaatcccaattactcgggaggctgaggtgggagaattgcttgaacccaggaggcggaggttgcagtgagccgagatcatgccactgcacttcagcctgggcaatagagcaaaaactccatctcaaaaaaaaaaaaaaagaaaagaaaaaagaacaaaaaacgtattttgtagaaattggatcatttgttacgtaccattttgtctctgcttttttacctgtattgtgttaagaacatgattatatagccacatatagatccacaacattattttgtgtggctgcgtagtatttcagcatatgtatgtatcactatttttataacgtagccactattattggacatatatattaactccaatgctctactttactcctgtatacagtgcttagacaaatgttcttatagccacatctttgtgtcattcattgttccctaaggatccattcctaaaaaaggaatttctgcgttaaacggtatgcacacttttaaggcttatcatgtactttttcaacgatgaaagatgaaaccagttgatagctgcattgacactgtctgaatctgcccaatttattggcggctcattatcttaataacccggcagcggtagcttagtgggtgggaggctcacttgcacggattgggcggagggaggcatcaatagccactctaaaaggactttgcaaagagaggcccctgggtggcctgatggggctgggttggactgtgttgaaggggcttacctgcccgggctgtgctgtgctgtgctgtgttggcccgactgtattggttatgggaggctgtgctgggcagttgggctgggttggctgcactggctcaggcctggcagtcttgtccctggtgtgatcctgggctcagcctggtgtgatcagcgtagtcaccaatccaagacattcattctagaagctggcatggcctccgtggccatgctgacagacttgtccattcacgtagtggagagtgattcatcagagctggtggtggcagcagtaactctgacagagtggaactgctctcaccatcctgtcacttggcctctaaaaataactcctgccggttccgagtgaccgcaccgccaggtgtctggaggtgcagtcctgtggttgtggctatgtgagggagggtgtgtttgtgtgtgtgtgtgtgtgtgtgtgtgtgtgtgtgtgtgtgtgtgttggggatagaggtgccatctgggggcctcttgattggttgacctctgagccagggctttggggtgggagtatgagaggcagaccaggctcgctcttttctaccctctcatagctggggacagagacagctagtgggggtagcagtatttttcaggactgtgtgctcactccctgctgaaaaagggcagagagagtggaatggagagggtgacttcagaggcaatatgacaagggtgaggcaggctctggggaagcacagcatttagccaatcaacatctatgtcccacaaaagcccacataaaagctcatcgtcttagtgaagtctttaatgtagggttcctttaaattagatacaaaatacaaaatacacacatatacagctaatttcttatcgtggctgattagagatcatctagcccaagtcttaaccaaggggattatctatctatcactcagggggtgatctatgcatgggcttcatgagctctcttgatacctgaaagatgataaaggtaggtatgtgtgtgtgtgagtgtgactttgtgtgtgtgtatgtgtgtgcaggtgcatacccatgtacatttttctaggagaagctctgcagttttcattgcattttcaaaggaaatcaggaccgataaaaggttttctttttctttttctttttttttcttttttcttttttttgagacagtgtctcgctctgttgcccaggctggagtgcagtggcgcgattttggctcactgcaacctctgcctcccgggttcaagtgattctcctgcctcagcctcccaagtagctgggactacaggcgcacgccaccatccctggctaatttttgtatttttagtagagatggggtttcaccatgttggccaggctagtctcaaactcctgacctcaggtgatctgcccgcctcggcctcccagagtgtaagaattacaggcgtcagccactgcgcccagccccctaaaaggtttagaactgcgctagtccaaccccctcatattacaggtaaggaaattgaattcagagaggaaaatgactgcccaagatctcacagcaaaggtcaaatcaaggtttcttgatgcccagcccagcgccctctgccacacaggacgccaccctcccctgcctggttccttgagccagggtctagctacctacagtaggcaggatcacagtaccattttccataccctcttggctggcatggatccaactgaacaggcttgaggctttcaatcacagtgggcagctgagccctcacctccagaccttcccactcccaggggaaaacccatggggcatctcctgactcattcctttagagggcatctttgcccaggacagttaaatctgtctgttgacattcttatcctggtgggacactctctgatacaggaagtgcctctgccttgtgggaaaggaactgaccctcgggtcctggaggacaggaaatagaatggctgagtgggcctgggaatattatatgatggaaaggcaggaggtcatagctagtggcaagagacagatgctgtctcattgtatatgggaggaattaaactgccataggagtgaataataggactgataagtaacatttattgaatacttactataagttagacactcttctaagatatttacatgtattagctccattaatccttataataactccatatggttattataaggaaactgaggcacaaatagattaagcacatctaggaaacaactgagccaggatatgaagtcaggtcctctgactccagagtatacatcactctggagccaaagtgtaggctcctagcctctatgctggcagacctgaaactccagtgtgcgttagaatcacaggagggctgatgaaagcactgttgctgttccaaacctcctagtttctgactcagtaggtctgtgtggggcctgaggatttgtgtacttaagagttcccagataaggctgggtgcggtggatcacgaggtcaggagttcaagaccagcctggacaagatgatgaaacccccgtctctactaaaaatacaaaaaaattagccggttgtggtggtgggtgcctgtaatcccagctacttgggaggctgaggcggagaattgcttgaacctgggaggtgaaggttgcagtgagctgagattgcgatcacaccactgcactccagcctgggcgacagagggagactccatctcaaaaaaaaaaaaaaaaaaagagttcccagatattgctggtgttccagggaccacactttagaatcatccctgtttcctgataggaagagatgaacagagggaaaagaagtggtgactgatctcacctggattattgcaatgtcccactgtggttccaggcttctccttcactccggtcactgagtcttcaccaggagcaaattaattttcctaaagcccagctctaattatgcctctgctcaaagctctctggatcctctgacactatccaccattgctgtccactagaaatgtctgtagtgatgaaatgttctacatctgcaccgtccagtatggtaaccactaaccacatgtggctatgagttttacattttgttccattaaatttaaatttaaataatcacatttggccagttgctagacagtgcagtgcacttggtttgtcattcaaggctctgcttggcaccagctcctttctatctcctcagggatagcctcaaccctcagtatcccaggctccaggtcatatgcagcgtttcctgattctaccttgtaattcccagcactatggcttgtgttatgctctctcctcagtctacattgtccttctgccctgcctttaatgcccaacccacatatgacctcttcctcgaaacctcctttgacacctgctgctctctaatctttttctcctctgaactccccaacactctgtcctcttcttacaacctttagtgctttctgttttacattgcagttggctggtgtgggtactttctcttactaaactgtgagcttttggaggatgtgactgttttctgtagagagctcttgcttcctactgtaggtccctccaggtacacagaggagttcgacaaatcccacaaacctttgtactggcacactggggatacagagatcggtaccataacttccctgtcctcaagctgctcacaggcttctacgagagtctgattcatgcccagagaaccactgaagccaatggttattttaggcagggagataaaagccacagagggcccagttggcgaggggagtccggcaggagctgcctaagcagaaggctgtgtttacatacacagacgacttctctgcccagcctggcctagtgtggggagatgggaacattcaggcgtcactgcctggctgccttgtgaagttgcggattaaccagtgatgcagcggctggtctagccgtctggtccctgcagatggatggatgaagagaggactgaaaagacagcagagcagtgccagcttctggaagtgaagtgctggctgggtggagtgggcacctgggctgggaatgtgagtgcaaggaaatgtttgtgatctgacagcagacagcaggtgaaattctgctgggtctggcttggggggttatgaggtcttcataacagtccctgttttaaatggaaaaactgttgaaaagaaaaaaaaaaaaaggaggtcaggtgcagtgggtcatgcctgttatcccagcactgtgggaggccaaggtgagtagaacacttgagctcaggagtttgagaccagcctaggcaacatggcaaaaccctatctctacaaaaaatataaaaattagcagtgcatggtggtgtacacctgtagtcccagctacttagggggctgaggtaggaggattacctcagcccggggaagttgaggctgcagtgaaccatgatcacaccactgcactccagcatgggcgacagagtgagaccctgtctcaaaacaataataacagcaacaacaaaacagaggaaaaaaagatagaaacagctttctggctttagactctaatcctaagagtattttacatcctgaaaatctctagcatatattcatctctgggacaaaaacattaaaaaaaggaaactttattgatgttataacataaacacagaaaagtgcacagatcataagtttacacatacttgtgtaactaccccccagacatgaacagaatatgtcagtatctccagaataaacctgtgtgaagcccaatgtgtgtaggattaatgatagaacaaacacaggccttggagtcaggcatgcctggggttgaatcctgggcccctgcacctactagcagtgtgaccttggatgagtgatttaacttcagtttcctcccctgtaaaatcaaggtggatctataatgtctgccttacagggaagtaggagatttaaaattgaaaatataggcaagttgctaggcacagtgccagcacataagtggggactcagatgctctctgcaatggcgatgttaattgatggtgatgctgcagcaccttctggcacctgggaccagggacacacacacagcttttctcctgttgcctctcactgctcccagcctctgtatgatactctccagctctcttctgactgcaaggaattagagatgctgtgatgatgcaaacctcagctgacacttcaggcacccgacgggaggctgggtggacatctgtatctagtgggtacatggccagatttttcatgttctggcctcaggaatgtggctcccagacctcctagaggggctgatttcccaagaagcagctggaagcatggggacctattaagaaacatagccgaggtggagataaggcagaactcagcctcaggagtgtcctggcatcctgggtggactcctgactcctacttgctccctggcctctggctttcggtgtgaagatggccaacacatactatgcacatattgtgaactgggcactgatgtgggccttcaggggtgtgtgtgggcggagggaagggagtatgatgaaaagtggccattatcctaaagctcatagtgcaatggaagtttaaaacccttggacaggtcacatgaccctgaacttgagggtggcaggacggagacagagaggccaagaggttatttctagccagaggagttggtgcaaagaggaagggttcaggaacgacttcctggagaatgcctagaagaataactatgggaaatgggaagagggtctcccaggcagagaagagggcacagccactgtgccctggggacctggaaccagtcagtttgacaaagctcatcacatggaatctgagaatgaggctgaagagccaggtgagaccaggctgtggaaggtcttgagagtcgggctgaggtatttgagttgcttcatcagagaatgaggagccactgaagcttcttccattgaggaagcagagccagaccagatcctcttactgtgctctgtggagaccagcattgtttttagccaaagatggcaatcagttgtccaagccactggagcggtctgtgagagcctctgggatgcccagacatgtacagggggcttggctgtgggtatagaagaggaagaggggcatggaccagagctgaggttcccagctttgagaaatgacagtcttactggagacgttggagagcctcatgacaacggagccccaaattcaaaagtagaggcaaggatgagatgagggtccagtaggcagagaagaagaaactggctgggggagcatgcggggcggagatggggccaggctttctggaagggaggcaaccttcagaatgggcaggctttggagacactgagggtactgaggggcaccctagtggggtccatctgaggtgcagaagggagcttggagcatgccagcaccaaacagagcctttgtgggcattcttgcatgtcattctcatagctctggaagacggtgctgatattatccccattgtacagatggggcaactgaggctcagagaggctaaggccttgctcaaggtcatgcagctcctgtgctaataaatgtcccccatccctgccccagcccctttgccagaggtgaacattgcccttaggctgttcaacaacactacactagatacgtatggaaaagtgctttgtatactgtgacctgctatgcagtttgcaggcatcctcatcattccacactagaataaggcttaacgcaggagggtgtggttcccacggtctgggctggatggaaggttacagggaagggtaaggtctctgggaactgcagtgctttgagaggcttcttagagaagatggagaagaggaagtagggggcagctggaggggggaggtccctgcaaggtgggcactgccacctgtccaccctgcctacttcctccacccagacacagctgccctgtggtgccctctgcagagtgccaacctcagtgaaacagcctgccaggcagcacttcccagaatggtgggtcatgctgctctgttaagtttggctccgctagctccctccctctggcccagctcccagtggcctggggctgtcactgggcccggctgccctcccgggcaggagccagctgccctccagctctcttgtcctggaacaccctcctccccatgacctcacctttaacccagcttggcttagtgtcttctcctccaggaagccttttctgatccctatgggctgagttaggaccccagagtatctaaacctgtactgaccaaaagaaatataatgtgagccacacgtgcaagccacacgcaattttaaattttctagtagccacattttttaaaaaagtcaaaagaaacagatgtaattattcaaatgatttgttttatttaacccaatacattcataaggtttttttgttttttttttttttgagacggagtttcgctcttgtcccccaggctggagtgcaatagcacgatctcagcttactacaacttccgcctcttgggttcaagcaattattctcctgcctcagcctctggagtagctgggattataggcacatgccaccatgcccggctaatttttgtatttttagtagagatggggttttaccatgttggccaggctggtctcgaactcctgacctcaggtaatccgcccacctcggcctcccaaagtgctgggattacaggtgtgagccatgcccgagacatattacattctttttggtatgaaatcttcaaaatctgatttttatatttacagcacatttttatttgaacgagccacatttcaagtgctccatagcaactagccatggctagtagctaccatattggttagcacagacctaaaaacagggagtttataagggttgaagctcagagtttggcaccagacatacctgtcagtcatattccgaccctgccatttattagctggatgaactttggggtcgctaacccttctgagcctcagttacttcagctgtgaaagggattaataatttcagtgccagagaattgctttgaggattaaacaaatgaatgtgtgtccagtgccaggcacagaggaagtgctcagaaaatggtggtgcttcaccttctagtatcctctgatgtgctggggtacgtgcctccactagattgattgtgaattcaagggcagaggctgtattcaattcctccagccttccccagtgtccagggcctggcttggtgtgagcattactgcttgctgaatgaaagattaagtccttgggctgggagtgctccccaccccaccctgcttgcccagtagtcaagggccctggtggctgggagtcaggagaccactgactacttgtgggtgaccttggcaagtcactgctttgcttagaaccttggtttcctcctttgaaagataaaagggagataggaggggccctgcctgaagtgtttggttgaatctctgccccgcagtgaccttgggggtctgtggctgactctgtgtcccttgctttcccagccagtggagcgaatcacttccgttctcctcctggctttcctgtatcctggacttttgcaccattaagttccatccagttaaaatttaagaggaaagaatttctcctgcctcctagacagagcagagagggaatgaagggtcctgtcccttctcttctgccagcatctgctgacctcccatcacagcagcccagtgacagacatggggcagggattctcccattttataggtgagaaaattgaggctcagagatgtcaaataacctgcctaagtaatacaaaaagaaatggtagcgctagggctggaagcagaatttgcagctaaggaactgaggaaccccttttttggatgggctcctctttccttctttctccatgagacttggtcctaggttgagtcctatccctgtgcctcagtttccctgcctggggaatgaaaacagtcaagtaactcaagtagtaattgcaactgatgcctatgggggccatacattcttaagtgtctctcctgcttcctccagcctgatttttctggaaagggttattgttgggtaaagtggaaagtatgtagtccagggagccagtgtaactgtgtaagcgtaaccttgggcaagtcactcccactctgagcctcagcctgcctatttataagatgggggccgggcgcggtggctcacgcctgtaatcccagcactttgggaggccgaggcgggcggatcacgaggtcaggagatcgagaccatcctggctaacatggtgaaaccccatctctactaaaaatgcaaaaaaaaattagctgggcatggtggtggcaggcgcctgtagtcccagctactcgggaggctgaggcaggagaatggcgtgaacccgagaggcggagcttgcagtgagccgagatcgcgccactgcactccagcctgggcaacagagcgagactccgtctcaaaaaagaaaaaaaaaaagatgagggatgatattatctcacaagatgctgtgcagatgacacacaaaagtattttgcaaactggaaagtgctaatagaaatgttagtgaataataataataatcaaaataattaaaatagcagaagcctcattttctgtgtggtctcaatgacctgaagtgaattgagccctttgggtataaatgcagaacgatgtctgggaacatcctgcctcggtctttggagtgtagcctggattctcctgggaaagtgagaggctccatctggttgaggagggtgggaaagtggccctgccccaggggaggagtggggagggcttcagcctgggggaaggaaggaaagggagatggccagggaaggagagttgaactaagaggaacagagagagccttggccatgcagcccagagcctcctgcccacgggagcccacgattgggaaggctcagccagcaggggagactgagcctatttggaatcaaaatacttgaaggcaggcagtcaagaatctcttagcagctgtgcatctgaaacaataaatgcatctggtataactcctgagttttattggtcctttcactcattcatttaaataaatgtgtggtgagctaaactcaaacagagcaccttgtgtggcaaagtgacttgcccaaggccacggccccaggggcctgtgtgagactcccttgggagctcctgggaaaaagtgaatttgaaaggcctggggatgagaagtccaaaggcaaaggacaggatttgtacagaaggctgccaagcaggacactcgtccttctgtcagtcggcctgggcagatttgtctgtcttcccaccttctgtctggagggtgggcctgttctctaggactgggagaagctggcttcattctgctctctgctcttcatccgctgctgaacctggtgagcagggggagtgaaggcaccggaagctttgtctaaagacacctgatgaaggaggtttaagttggagaagagaaggcttgctttgggcatggtacaaagggacgcaattgtatcttgagttctctaaagggtgctgaggagagggcatagcctcattctttggaggccctagagtgcctatgaggacccagggtagaaggtcaccatgatggagcagcacactgggagggaggagttgggggagggaggtgcctggctctatagtgtgtgacaagcagagatggagagcccactggtgaggctgatactgagggaatcgcatcagggaaggatggagggctcagctcacatcgaggctgcttcccagcttggggcctctgtgcttcccagggcagtggattctgtggtaagaactatggccagcacatggtaggtacttaggaatgatgtgaagaatgaatgaatagttgtgtatgcctggaggtgagggtggtgactgggggttcgcggtcatatgggttgcagtggacccatggacagaaatctttggagatcatgctgcggttacccaccattctctctatgccttcgccatgaactagggaccctagagataggaacgtccagccctttcgtcatttgcaaatgaggcccagagcatggaacaacttgcccaagggtacttgctgagccagtggcagacctggactggaacccaggccctctccctcccagagtcctctgtggcttgaggtccccaccttcggattgtgtgagatggaggtgctgcagtggttggactggtttttttagtgggtaacagtgctcctggaggggaggagcatggcttaccttggttttgagccatgatctctgccacaagctgcttggccagcccctgccctttcctggagctcaggtgcacactcagcctgtgctcagacacatacagcaagtgcgcctgtacacaggccccatccccaataggtccctgggctctcactgttacacttactgtcattgtcaccaaggcgcatgtggacaaatgtacacatagacaccctctggacacactcagaggcacagaggattcccaggagacagttgtaatacctcctcccggtgggggaggacgccgagtcctaggcgggttctgccctgtcgctgtgctgcaggggtggtgaggggatccggctccggtgggatgggaggcccactgaggctgagtcaccccttctgagtcaggcatgcatccccctcttctctcctccccctccctttctcgctgatgagcccccaagagggcttggcgagagcaaggaggcccggggctggctaggaccagggtgggggcagccggggcgctcgagaggccccccagctgcacagtcccgcagtggtctgggaactgcccgtgtggcacggaccgggaggaggtggcctgggagcctgagagagagggcggggcgcggggggaggtgggtggtagaggagacaggcagagaggaggcggaggcaggggcagggccgcggcgcgctgggaggcaggcgcaagcggcggccgcccctgggctgggctccgaggccggggcgggggcgggggctggccgcgcgtcgggcgccaggcccggggctgtgggcaccgtgcccagcccctggcgcacgccgagccgccgccgccgccgccgctgctgcagtcggcatccatcagcgggcgggggtgtcgccgaacaggctgctccgcagagcccgccgcgaccccgcgccgccccgccccgcggcctgcctgccagaggagccgagggggccgcccctcgcccaacctgcccgacatggggaaccccgggcccaggtaggcacatgggggaatcaggtggctctcggggccgggggcttgcaacatctaggcccagcctccagccctggggaggaacgggggcgaggccgagaactgagttttcaggctgttggtcccctggccagtgtgggggagggtctcgctgttcctccctacctaccggtctgcagcctcctccaaggcctggagagaggatccggaggctgggggttggcggggggttggtcctgctgtaggatgagcggtgggtgggcgctgggctcccaccggctggcccagtctcttttcggagagcactcctgctgccgcctccagaggccaagggctctttggatttctgctgcttctgacgctgcaggaggagttcttggctggagcctgggatgctggcgagcccttgccctcatctctcctcactctggttacggacccttccccgctctgggcttgcctccccttccgtctcccttccaagtacctcagagctgctaggagggatcttagccctaggacttctgcagttctggcctggcattgtcctggccagtgaccgtcccctgatcagagggagagggcttgtgtgtcccacttgtgtctggcaccttcacacttggggaggtccaagggcccgagaggctggggtctcagggatgggcatggggggccaatgtctacagccattggggtacttactgggtgcagaggccactgactggcagacgtatatggctcaaagtggtccatggagaccttgaagtctggacaaggaccaaaagggagttctggggatgctggtctctccctcagctgccagccatcgtcgttgcttttccctcggagctctgaggatgcattggtgggggagagagcaccacgtgttcccacattcacttctggatccgcatagcacctcctctgcacccaaaggtgggaatgtgagacggccagatttaggacctctccagggctgtgcggggtccagcggcttggcttcattcccaccccatccccccaccctcagcattaggagccttccagaatcagtggcacttgagccaggtcaagatctggggcctggatggtgccctccgcagctcttggaagacagtgcctcctgtcccgggcaagggtgtggagaatagaggcagctgtgtgcctctctgcccacccattcctccagatggagcctgcggcagaggcagcctgtgccagcctcccctatgagccaccgtggcccaggaaggctctgccagctctgtgcaaggatggagctggcttctcctggccagcctgaggtcatgcctgcctggcaacccaggcatagtatttatggcatgcagagcacagtccctgggatttcaggggcacctcaaggcagtcctggaggagatcagtgcagagggcattgttcctattaaagcccttcctgggctatgtgacagtcctcctgggctcagccctgtgagcttcttgaagagcttcttccatagaatcctgcatgaaaacaatgcttggtcaggtagtcctcactcagtcgatattgaaaggttgaacggggcctagagagtaagagtgacttggccaaggtcacaaagcagctgagcgggggagtcagcattaatgtacccaggtcttccacctcttgttctggggctcttgcagctcaggtgctggcttccctgctgcggtggttgtgctatagacaggactctgccaagggctaggcattgtagcctggagcctgaggctacctgatcccttaggaggggtgttatgttggcctcccagcccttgccctcagtaggtgagcaggagaggtcagggctgagagaaagggccgtgggtggtcctggaccctcttggaagtgcatagagctgagaggatgccaggtgcccagggatgttctggcctgagcctccagggggcaacagagagttttctgacttcaggctgtggtgggaggtgcttgttagcacctgccgggacttccctaagagcccctttctgggcttctctgtcccatttgttaaaaggggacacaggcgtgcgccattgcgcacgcctgtaatcccagcactttgggaggacgaggcgggcagatcacaagttcaagagatgaagaccatcctggccaacatggtgaaaccccgtctctactaaaaatacaaaaattagctgggcgtggtagtgcacgcctatagccccagcaactcgggaggctgaggcaggagaatcgcctgaccccaggaggcagaggttgcagtgagccgacatcgtgccactgcactccagcctggagacagagcgagactccctctcaaagaaaaaaaaagggcggggaggatgatcatctctgcctggagataaataccaatgattacacaatcaaagtgatagtatttattgaaacttactgtatgccatgtactgcaagaagtgctttgagtcatttcacagtaaccctgtcagatagatgtgattaattatccactttttacagaggagaaactgaggctcagagaggttatgtcactggactaaagttacgcagctggaaagtgcgaggcggtctgagtccagagcccttctttctaccatgacatttactgggggcaatatctggaagtaccaggttggtgtccagtggagccaggcaattcattggtaggccagggccagtccaggtggagaggtgtgtgaggggtgtgtgtgtgtgtgcctggtgaggcaagggtggctttgtggactgaatattactatagtgctgaggggtaggggtagataagtactgactaggagctctcagagaaggattagccttggccttctccttcctggccagggtcccccagaagtggggaaacaccagactccctgctcccattggcttttagggaagatgggctggctctggacacatcccgaggccacagtggggactgggctaaggaggccctgtgggcagggagctgagccttggtggatgggtgggggtggagcaggctggcactgcttcctttgtgggctagaggcttgtggatcagaatagtaacagctaacatttattgagcatttattatgtgccaggcccagttttaagggcttccatgtacaactcatacgttcttcacaaagccctgtgaggtgtagatgaggtataggagttattcttcccgttttacagattgatggagctgtggcttagatagttgttcaaggtcaaatagctaggctgtgggggagtcaggattcaaacctaggcagtgtgggtcagagccatgttcctgaaggccatgccaggcagcctgtagtttctcagaggccatactctgttttgttcaagttgaaatagtcactcagtcagatgcatccctctcctcaaaggcctcccagtctagctgggagagatgcagacatgacacactaaaagtaaagagtgtgctattgcataggctcagcatggattcctattttggtgctcagggaaggcttcaagaagacggggacctttgagctgggcactgaaggccaagtcggatttcgatggttgaagggggaagggcacccacttccccaggtcagaggggaaggaaataggaatgcctctgaagaagagtgggcggtctgatgtgcgtggaacagatagtgtgtgtggcggagtgtgagctgggaggtgactcagaaagtcacctagtgtttgggtttttgatggagctctggaatccaccagacgtaggctatagtcacagcaatgcattgtattagccacgtggccttgggcacatcactcagctggcccaaacctcagtttcctcattcgtaaaatgcagataaacatgcctgtctcacagggaccatgttgtggttgttatataaagcacctagtgtaatgctaacacattgcaggaactcagtaaacattacttctctcccgcttctgtctctcttaaatgtcaggccaaggtgtttcgacttgacgtgagccgggatgctctaggaatctttgcaggattttagtctgctgaggagcatgacagaactgtgttttgggaaggtccttttggcaaccgtatgatccacaggagagggtggacgtgatcttacaggagaaaccttaactgtggggacttggagggctggggagggatcaagattggcactcattaaggtgtccctctggtagtgggtggttcgccaggttggagaaggaggagcttggagtgggtaaggccacagggtcaggaattctgtttcaggcctggtgagtttgagaagggctggtctccctttagtcatctggaagattgggtagcatcttttttgcacatctggcctgtttttcctttgaattatttcttttgaataaatccccatcagagcttcctctataatagcagtaaattgggactaagtgtccaacaataggaagatgattgggaaagctttggaacatccactggataaaataatacgcagtggtgaacacccacagaaaaactgcttgcagtggatggagctgtgcaattgcaaagctcttttgcatccttgattcattttgtgcttatgactgctctgcgacagaggtggggccggggctagatcctttctgtgtttgaagagaatgacgctagactccagtctccttgaaggcagagttgagttcacattttattcattgtttcgtcgcagcatgttgctcagtggtttgcaaatacttgtccgatgaaagaatgagtgaactaatcaagaggggaagtgacttgatcaaggtcactcaagttgtaagacatagtgcctgccatattcttgctattccctacttgccacattcttctcactaaccactcactatcttcgaggggaataggacagagaggttcccagtgaggacctggcacttgcatagaacagggtttaagtcttctttctgtttttactagctgtgaggcaattggcaagttaattaatctttcaaagccccagtttgcccagctgtaatgtggatagtccaagtacctggttttagggttgtcatcaagattgaataagttaaggcatgtaaacatcttggcatggtaactagtacatagtgaagtatccatgaacattagtggagatgatgatgatgtcatgatgtgatgtcattaatggtctgatacaattaatgttaaatgggaaagaagacccataagattatcagtattcatattacaatggtataaaattaggtatgaacatagatacagattggaagaaaacaggtagaaaatggagttccagcaagcatatgggaagtgaataaaacagaaaaacaaatatttctttactgttatatttacttttctttagttttaattacaaaaaaaatttgtggaaaatctaataattcagaagtgtaggccaggcacggtggctcatgcctataatcccagcactctgggaggctgaggcgggtagatcacctgaggtcaggagttcaagaccagcctggccaacatggtgaaaccccatttctactaaaaatacaaaaagttagccgggcatggtggctggcgcctgtaatcccagctactcaggaggctgaggcaagagaatctcttgcacccggaaggcagaggttgtggggcagtgagccgagattgcgccattgcactccagcctgggtgacagagcgagactccgtcacaaaaaaaaaaaagaaagaaagaaagaaaaaaagtgtattctccccttagatccccaaacaaatcctactctccagtcgtagctaataacagcatgttgtgtatccttccaggatattttctataccaacataaacatacaaaccagaatgggatcatacattgcattattgttttacaacttgcatttttcatgtaactacacattgacatctttttatgtcagtagatataaaatctatctcaaaaatttttgcaataggtatgttatactttcataattaaatttttaatggataaaccctactaatttggccagcccccctgttgattgacatttgaagttgtttccaattttacggtattctaagtaacgctaactgaactctaacagtatttagacaattagtgaaaatcaagtgagagaaggagtcagaaaccatgagaccgtgagagttgccctcaaaggtctgctgcttctcccttctcctgttccctcctctcctcactggagcctgggggaactggtcttggaggaggccatctctctgtcaccctcaaaaggtggtgatgtcccagggaaagaccctttctttcacccacccagtatggagctctcctaggaaattttcaaattctcttaggatgctctaagctgctgcttgggctgtgcagctgcccacacccagactgtccttggacaagctttctaccttctctgtacctcagtttgtccatctgtctggtggtgatcagagccattgctgccactgagtgtcttctatatgtcaaatactgtgctagagcaagcttcatgtgcattatctgtttttctattttttctttttattttattcttcttatttttttgtttgtttgttttttgggtttttttgttttgtttttgagatggagtcttgctgtgttgcccaggctggagtgcagtggcaggatctcagctcactgcaacctccgcctccccggttcaagcaattctcctgccttggcctcccaagtagctgggattacaggcacgtgccacctgcctggctagttcttgtatttttagtagagacaggttatcactgtgttggccaggctggtctcgaactcctgacctcaggtgatctgcctgcctcagcctcccaaagtgctgggattacaggcccagtcgttattcttgtttttttaaagacagcctgtcactctgtcacccaggctggagtgcagtggcatagtcacagctcactgtgacctcaaactcccaggctctagtgatcctcctgcctcagcctcctgagtagctgggactacaggtgcaccccaccatgcccggctaatttggggggggcacagggtaaagacagtgtctcgctctgttgcccagactgctctcaaactcctgggctcaagcaatcctccctccttggccttccaaagtgctgagattacaggcgtgagccaccacaccctgcctatctcatttaattctcactatacaccttggaggtgcaggggatagtcttctcaatagaggttaagtaacctgcccaaggtcaccaagcctgtggcatcaggattccagctctggctcataagcccatgtctgtaactgctgtttcctgcccactctcaacagtggctaattggtgaggtccaagcaaaatgattataaaaagatcctttaagttgtaaagtgccctgcatgtgggagggattgatactgccgttattatttctacatccagagcaacagtagctttggttatatggcttacagcaagttggaggtcgtgggatgtagcagcattgagtggggagagcactggactgtgagccagcagacttgagtcctagtcctggctctccttgaaactgactagccatgtggccttggccactaagccgcctgggaaataagctcacctactccgtgtggcccttgtgcagctcaaataagataaagcccaaaagacagccagcatgttgcccagctctcggaggataccctgctaacgggaggtctctctctgccttctgcatcgtcatcaggatgggccaggtgggacgcatgtctccgttttaatgctgttactctgcagttctgtgctgtcacgtggtccccagcccaccactgcacatcagcctgaggctccctagtggcccgtgaagcttttgggcaagaagccaaggctgatgggtggtggccttttcacattgtttggtctaaagtggtgtccgtgggtactgcaaacctctgacgaattgccgtctccccactgccatgtacaaatccaagcaccagacaggatgactgcagactcagctccctttttgatccttcttgcctggctgtgaaagtggcttgaggtctcagaggcagctctctcagcctgtaccctccatcctttcattcacgtccatgtagacattatcactcagggaagtgagtgttccatactggggaagtccccttgggaaggaagtcacatcatctccagcaagtgagagaaagaataagccctaataggcactctttctgtttttttttttttttcttgtaattcttcttttttcttttctgactccgaaagtaatacatgctcatagtagaaaattgaaaaatacggagaaaaaggcccctatttccttctccaagggaaggctattgttaacattttagtctttggacttaattggagagtaatatttctggagcaaatatttctaatattctggtatgtgtttagtgttttacaggcatgatctgattccattttcacagtaagcctgtgaggtatgtaagtttatcatcatgactttacagatgaagaaactgaggcacaaagaggttaaggggcttcctgacggttcccttgccttccttgacttcttagcttattctgcctcttctcaggctccccttatcctaagtgagcatcaggtggtggatcagtcagattctgacaggaaacagaattccactcagatgcttcacctgaggagatgttaataaagatgtgagcagggtgaggggaacccacatgggatggtgaggcacccacaaactaacagtgacagaaggcattactagctctcggcctgaatgagcaggagggagtggtgttacctgagttccgtgactggtagaggtgggcagggagctgtcgcagaggggctcagccaccaccaggaccacagagagagaaattggggaagatacacccaggatctctctccttccaccttctgaattcctgccagtgccttcttctttattattttttttttaagacagagtctctgtcgtccaggctagagtgcagtagcatgatcttggctcactgcaacttccacctcccaggtctgcctcagcctccctagtagctgggactacaggcgcctgccaccacacccagttaatttttatatttttagtagagacagggtttcaccttgttggccaggctggtctcaaactcctgaccccaagtcatccacccaccttggcctcccaaaatgctgggattgcaggcgtgagccactgtgcccggcccctgccagtgtcttctattggccaaatggaaccagaaaccaggaggcaagggagctcaagggacagtccaatgggccagcctcctgcttcttcaagcaggtcatggatctgggggtgcacatggagactaacaacccaagcgacatggttgtagggagatgggagagacatgtcctctgacttcccagaaagagttgtcttagtaactgactattaaaaacatcattcaaaacaagagactttttttctgcctgggagtctcttggtgttttggtgtctcctccctcccctgccccccatctcctctctcacctggttcagaatttccaagaacacctgggcaacagtctttggtgtcatcggtgtgcagggtttagaagagacaaccttgcttgcatgatacatgtggctgtgtgtgttctcatgttgtttcactgctgtgcctatgcatacaaagacatgcttcttgtgtacatgtcataagcatctataacatagtctcctctgtatccagcagaatattcactttttatttatttatttatctaattttatttttttgagatggagtcttgctctgtctccaggctggagttcagtggcatgatctcggctcatttcaacctctgctgccgaggttcaagcaattctcctgtctcaggctcccgagtagctgggactacaggagcctgccaccatgcccggctaatttttgtatttttagtagagatagggtttcacgatattggttaggctggtctcgaactcctgacctcaggtgatccacccgcctcaccctcccaaaatgctgggattacaggtgtgagccactgcgcctggctatttatttatttttgagacagaatctcgttctgtcacccaggctggagtgcagtggtgcgatctgagctcactacaacctctgcctcccagtttcaagcaattcttctgcctcagcctcccaggtagctgggattacaggcacgcaccaccacacttggctaatttttgtattttttctaggaacaaagtttcaccatgttggctgggttggtcttgaactcctggcctcaagtgatttgcctgcctcggcctcccaaagtgctgggattacaggcatgagccaccgcgcctggcccaggacattaacttttgtatctcaaagtcctcccattctctgtaatagccttgatctccatggccttcctctgatgtggacagggtctctcatccctgtttgacacatgaggaaacatgctcagaaagaggaagtggctgggtgtggtggctcacgcctgtaatcccagcactttggggggccaaggtgggtggatcacctgaggtcaggagttcaagaccagcctggccaacatggtgaaaccctgtctctactaaaaatacaaaaattagctgggcatggtggcatgcacctgtaatcttagctactcgggaggctgaggcaggagaattgcttgaaccagggaggcagaggttgcagtgagccaagattgtgccactgcactccagcctgggcgacagagcgagaatccatctcaaaaaagaagaaagaaagaggaagtgacctgcccaaagctgatcagatcggaagtggaagcactgaagcagcagtggtcccagttctgagttcagctcttcccagtatatttccttttcaatcttgggaagtctttctttagccagccccaaccctgggagaaatcagtacagcatgagccccctgaggttgctggaatgccatacagtgggaagaactctggagtcagagatacctggcacagccttatgactttggacaaatccatttgcctctttgcacgtgtgcatcctcattagtaaaatgaggagaataatatcaggactttggatggaaacatcaggtgttgagataaaataaatcatcaggagaggcaggctggctggtagccacaaaggctcccaaggtgaatgcagcccaggtctccatcctcagttgggtagactagaaattgtctctttgtgttctatccatcagttatccatgtgttcaaccttttatccatctacccctccatctgatgccaaatctgctgaatgtgaattctggcactgctgtttactagctgtgtgacctggagcaagttccttaacttttctgcttcagtttcttcttttgtaaaatagggataataagagtacctattacccattataggttattgtgaagatgaagtgagttcattgatgtaaagtactcagatcagcgcctagcaaatagcagactacaaatgataatgttgtttttatttatcaagaactgcgctgagccctggggataatggctaaccagacaaaattcttatctttatggagtttattttggaaggagggataaaaagaaataagtaaatcaatcaatgatagaagatcagtttgtgataattactgtgaaaaccgaccacccagctgggcgtggtgactcacacctgtaatcctagcactttgggaggccaaggcgagcagattggctgagcccaagaattcgaaacccaatctctactaaaatacaaaataattagctgggcgtggctgtgtgcacctgtagtcccacctactggggaggccaaggcaggagaattgcttgaacctgggaggtggaggttgcagtgagctgagatcatgccactgcactccagtctgggcaacagaacgagactgtctccaaaaaaaaagaaagagaaaaccaaccacccaacccagcatgcttgcttaatggattcgaagtttctgtttggggtgataagaatttttggaaatagatagtggtgatttttgcacaacattgtgaatgtaattaatgcctctgaattgttacccttaacaatggttaacaatggcaaaatgaaacaaaaacaaaacaatctagcatgctgtaaccaaaaaaacaggggaaaggacctaaataaattagacagggtggtcaaggggcacacagattcacaatctgaaggtgggagctgccaagctgtccatgcagagggaacattacagactatcattaaggacaaagccccaaagcctcgcacagtcgaagaacagacggaaagccaatgtgacaggctcatggtgatggtggcggcttggggagggaataggggaccagtagtggtgggagctgatgctgaatagatgggcaacagccatatacagaggtctgtagctttgataaagagtttgtgttttattttaatgggaggcccttgggggttttaaagagggcatctggctgggtgcagtgggtcacacctgtaatcccagcactttaggaggctgaggcgggcggattgcctgagctcaggagttcaagaccaccctgggcaacatggtgaaacccccatctctactaaaaatacaaaaattagctgggcatggtggcgggtgcctgtagtctcagctacttgggaggctgaggcaggagaattgcttgaatccaggaggtggaggttacagtgagccgaaatcatgccactgcactccagcctgggccatggagtgagactccatctccaataatattaataataataataataacaataataataaataataaataaagagggtgtccattgagagttttggaaagattcttatggctgctttgtggataataaactctaggagggcccaagtggtcacagggagaccatggagcaggctggggcagcccctggaacaagctgatagtggcttagatttaggcagttgcaatggtgatggagaaaagaagcaaatccaagttactggactcagagatgctgactcatgctaaccctggttagagggcctgatgtataaaccggacaccagttgattcattttttaaggagtggtttcactgccaggctgagtggatattgcctcatctgggctaggacaccctctccctgcaggccacccagataaacagccacaggtgagaaggctgctgagtgcccctggaaggtgagctagaggagccagaaggtggttagggtgttgaagagggtcagatgctgacagtgtgctgggccagccccagcccaggcaagcatccctggcctcactgggtccctttcccccagacagagtaagtacaggcgctgtcagcatttacttctctggctgacctttctcttttctaatcctgtgcattaggcctttcatatgttagtgtcatcagtctggccctgctggcctctgtctgttagaaacatctctttttccatttgttgtgggtggacacttctgaagtcccgttctcaggcccctcctcactgcagcttcccattactgctggtaattatagaccctacgtctcaggcttgttttattgggtgtataccatgttaagtgcttttttttttttttagatggagtcttcctctgttgacaggctggggtgcagtggcgcgatctcggctcactgcaacctccgactcccagttcaagccattctcctgcctcagcctcctgagtagctgggattacagcctcccgagtagctgggattacaggcacgtgccaccacgcccagctaatttttgtgtttttagtagagacagggtttcaccatgttggccaggatggtctccacctcctgaccttgtgatctgcccacctcagcctcctaaagtgctggtattacaggcgtgagccgccacactgggccactaagggctttctctgtgttattttcctaaatctccttcaccatcctgagagggagggaggagtgtctctgttttattaaacaggcaactcaaggccaggcatggtggctcacgcctgtaatcctagcactttgggaggccaaggcgggtggatcacaaagtcaggagttcgagaccaacctggccaagatggtgaaaccccgtctgtactaaaaatagaaaaattagctggctgcggtggcggtcacctgtaatcccagttactcgggaggctgaggtaggagaaattgcttgaacccaggaggcagaggttgcagtgagctgagatcgctacactctagtctgggtgacagagcaagactctgtctcaaaaaaaaaaaaaaaaaagtggcaactccggctcagaaaagtgaagtcacttgtccaaggtcacagagtgagcaagcattggcactaggctttggatctgggtctgcctgactccacagcctgtgctgtgaagcactgagccacagggccgcctgctctacctcccttcaagaggtccatgaatgactgtgtgaagtctctagccctgggcctggctggcagcaacgcttagtgttgggatctctgtccttctcctgcacagtgatgcttctgactcccagcaaggctcccagctccgtcactcctcccaagctccaaccagttcctccttccaggctgtttggtgctcacctttacaggcttctcactctgaagtgccagaatgtcaaggtctcctctctatcccctgcccaacccccttcttcccatctctgggcatttgcccacatggtgactcagctcaaatgctctccctgcatctcctgtctaaatggctcccttttttcaacacctaattccaccttcacctccccaccctagaagcttcctttgggaactctaggctatagtccagatcaccaggtccccagactctgctgagaggctgaaacatacatggcaaatctaaatcatctcctgcatgagtgtttagccatttcctgggtgagcatcctcttcccacactgcagccagctcctcgggaaccagcacgtgcttccctccaggggccactacagtgcctggcccagcctagccgcacagcaggctccatcagtctgtgctcacctgggcctgggcagaaccatgcccacgtgacgggctatgtcagaagccacggccacctaggctccctttctgtggcctagtgagagaaccatgctgttatccttggatttgtgaaataaagatttcatcatagatttttttttttaaagatgttatttttgatttataaatttttaaaaggtttaaacagattttatctccttctcatactgccataccaagccatgtgcctcagaaaaatttcttttttgacctctaacttaaactcattcaaggaatctccaagtatagtagcaaaaccaagaactacagttaaacagaagaaaaaataataatctgtcttcccgccacccagaaataactatagttaatactttgctgagttttctgtatctgtgcatgtgtattcattaacacagagataatctgtacaaactattgtgtatcatgctttttttactcaaatcttttccatgattttttacgtttttttccttaactctttagagtggataagccatcatttctctcactagcccctggccatggaatgcagaggtggctcctgccacgtccttggtgtctagcgtgaacctgagtactttctcctttggggggttctgttggggtttgcttgaggcagccaagtacagtggagagaaggcagacctagagttaggatctggggagtctggaggctggggagggaggagagtgggcggaggaaccagggaaacctggtttctgaggaaatgactgtcagtcgtcttttttgctcactgggtctcacctgtaaaggaagaggagtagattgaattatctcaaaaatgatctcaaaaggcatccagctcctctcctctgtcgttctgggagcgccaggcatttgctgccagcgggctctgctggagacccaggcagaggaagactgggatatttatttaaggttgctttcctggctatttcaaggaacctcaggcccaggaaaagttccgagagtgtgagctgaaatcagattgaggccatcggagagggaggagtggaagtgtctcccggctgtctgggcccacaaggggtcatgtggattctgcatctcacagcagaaaacacacagatgagtctgtgatgctttttttttttttctttttaagcaaaattaagtaggcagttattttaagggttcttgcctataggccttatctggcattatgaccagtatccttaagtgcaggctcagaaaagatcctgagcccggtgcaccggtatcatttggacccttccaaggctgtgggctcccctagagcagctctcattgctttgtatcctggcctggagtcagcactcattgtcctgtaagtgacagagagcctttatttaactatggctttacgttatacccataaagcagagagtagtggcttgagtggaaagcatttctgggtggggaggaggtgatggggacccaggccttcccttcctcctcatcttccttctaaatagcagcatcagtaacaacaaaccctctcatttgtactccaagcctccacgcaaaaagcctttccaccgttatccactctgtggggggctgaggatgttcagggccccagagctctcctgtgcctgagtgggatgctcagggtccctggctttctatccagtgctcttggctttgggctgggctgatgtccactgagatgcagggagaaaaactgaaaaatgaaaaggaagtgtggggcgggggacctggagcacgtggctagcccagggtggatgctgtgtctgtctgtctgtctatcagaggcctcccacgatggatggtgcaggggagagggcgtgccatgccagtctagcctgaatctctctcatgtaatatgatagatttagaggaagggcctggactcaggggtgagggttcctgctcatttctctatttccctggttttagcttcaaagcttttttttgaggatctgttgattgggggcaggaatgggtgcatctgatgcccctccgccaccctacctttctaaaaagccaacttgtacgtttaaaaaagtacgtatgtatattttatttatttattttaatttaattttatttttttgagatggagtctcactcttatcacccaggctggagtgcagtggctcagtgaaacctctgcctcctgggttcaagcgattctcctgcttcagcctccccagtagctgggattacaggcatgcatcaccacatccagctaatttttgtatttttagtagagacggggtttcaccatgttggccaggctagtctcgaactcctgacctcaggtgatctgcctgcctcggcctcccaaaatgctgggattataggcatgagccactgctcccggcttatgtatgcatattttaaaagataaaagtacttccaaaacatataaagtgaaaagtgaagttttctctcttatgtcacccagttcccagggatctctttcattttcctttacccacttctgccttaccaacctctcttaacattggtaagtatcctttcagaccttttactaaatgtgtgcaaacacaaacatatgttgttgaggttactgttttgtttttcttttttctttttcttttggagaaggagtctcacactgttgcccaggctagagtgcagtggtgcaatctcagcttactgcaacctccgcctcccaggttcaagcgattctcctgcctcagcctcctgagtagctgggattacagaagtgcgccaccacacctggctaatttttgtatttttagtagagacggggtttcaccatgttggccaggttgtcttgaactgccgaacttaggtgatccgccctccctggcctcccaaagtgctgagattacaagcatgagccaccgcgcctggcgtgttttgtttttcaaatataaaaatgagaccatgccattctctctctctctttctctctctgtaacttgcctattccagcagaatagctgggcaatgggtccttgactctctgaaatctcctcatttactgctgaaaggggaaaatgacaagaatagtttatcccagaaagcatttctctacgttgctcatgttttggatgagtctgagagaggtgaagtgactgccacatttgtggccaactcggggactgagcctgttcttttgacttttacatcgtcaagcctgcgcgtttttttgttttgttttgtttcaagtttcttcctgtcattctctttttggatctattctgtgaagttagcagggcaggaattattgaagcttggggtatgaagaggtgtgtccagcttcagcactggaaaggtctggaacccagggttcttttagttaaattctgtgcatccagctttgctgagggtctaccaagcgccaggtgaggtggctggagagacagcctggcttggaccctgcctggaggcggccactggcagccccgtgtgctcctggtagagcagggctccctggaaggactcatcatccctatgaaaggcccagagatttgagtccctgaagagctgcagacacagggtgggaggggtgcctgtgacttcagccactaacccctcacctcccatgaccctccctcctccccacttcctctgtctctcccttcctcctccctttgccctgtgactctttgtccgtttgcctccatctgtctctctccgcgtgtggttcctgcccctctcgctgtcataccattgctgtccctccctgtcacatgatctccttcatgccaatgcaggcgtgctggtcaccatgacaacagagacaggccccgactctgaggtgaagaaagctcaggaggaggccccgcagcagcccgaggctgctgccgctgtgaccacccctgtgacccctgcaggccacggccacccagaggccaactccaatgagaagcatccatcccagcaggacacgcggcctgctgaacaggtgtgtgcccgagagcatgggcgtacctttcctgcccagaccgtcctccaggtccagttcttagggctccagtattttttctggagggaggaaagaaggaaactaagatttattagtgacctgttacatgccaagcactgtgctgggagcattgttgttattttattttcttttttgagacagatctcactctgttgcccaggctggagtgcagcctcaatctcccaggctcaagcaatcctcccgcctcagcctcctgagtagcagggacaacaggcgtgcaccaccgcacctggctaattgttttaactttcttttttttttttaattgagttggagtctcgccctgtcacccaggctggagtgcagtggtgccactgcactcttcgctcactgtgacctctgccgcccgggttcaagcaattctcctgcctcagcctccttagtaactgggattacaggcatgcaccaccacgcctagctaatttatatatttttagtaaagacagagtctcaccatattggccaggctggtctcaaactcctgagctcaggtgatccacctgccttggactcccaaagtgctgggattacaggtgtgagccaccatgcctggccttttttttttttttttaactttcagtagagatgaggtcttgctatgctgcctagactggtctcaaactcctgggctcgagtgatcctcccaccttggcctcccaaagtgctgggattacaggtgtgagccaccatgcttggcccattgtggtcattttaaaattttattctctcagactaaagagggtagctactaactcccccattttacacctggggaaactgagcaccagcaggataaaatgagttatccaaagtcacattgccataaagtaacagaggtgaagacaaatctagatctgattttgaaggctgagttctttccatttattttcctacccctgaacctgtctgttctagcttggccagccccatgtaaccccagagcaaaacccattgccctaaagctacaacagactcacctcctcatctaattaacaccttccttaattcacgacaggcctggagggggcagggacttggccaagatcactgagggcatcagcagtggagttaggacccggggcgggcggcggtggggcaggtctctggcctttctcctctcctttaactcagtccacagctcccagactcctgctagatccagtgacagacaaaaagaaggagaccagatggatgctgtgatgagtcatgtgctgctctggggagacagggcagctctggccactggctttggtttcatgggatgctcctgcctcagaggatgcctatggcagcagtagcctgcagggaagatggggacccctcacacaaggccacccattatgcatggaagccctggctctcctcctgtacacaccagccatggaccctagttgccctgtgggtctcagacggtagcgactttcattctggggtctgtcttggccccagatgcctctatattgcttcttacttatatgaaaggccatggcttaaaactcactgagcaaactattcccttgcttggtcctgcagagcctagacatggaggagaaggactacagtgaggccgatggcctttcggagaggaccacgcccagcaaggcccagaaatcgccccagaagattgccaagaaatacaagagtgccatctgccgggtcactctgcttgatgcctcggagtatgagtgtgaggtggaggtaggggagcactgagtgccatatgtcccgtccccggtcagccagcctcaggtccagggcaggctcctgtgtgtacccagcttgggccaaaccagaggagtcctggaccagtcacagtgtccagagagatgacctggctcggagctcctttgtacagatggtggcaccaaagcctggagagagtggttatgattgcaaatagaattagacgaggtacagggctggcaccaggggaagattttgcagggtgactataccttggcaaggatgccaccatgtaagggctgatctacaaacagtagacctgggaactgggctcccctattcacccaggagagactgacatttaaattagaatcatttttatatactgggtggagagagggctcctcccttcctagtgaatgtccctgtccagggcaccatctcaagtctccaggacaaactagtcacctgagggttctatggcaagcccatcaccacgtcacagggaggcggcccattgggaagatgtcacccaggccatgtagaaaccctgtggtatggccctgccccatggtggtgacacagcagatgcctccttctgggtttggccctcctggcctcacatttaggtctccttttcctatataggttctgactcccgccctaattctgagctctcgctcgccccctctgtgagcccttagaggttctatccctgccgaggcagcattcgtggcccttctccgcatgtgtgaaagggctcagagggtgtccttgctactgagatatataggagctgcccccttttctctcccatgcactgattttagggatgtggcttactcctgagccctgggaggctgagtccctcttctctacagggttttgatttgttttgtttttatgtacatgtattttttcttttttttcttttttttttttttttgttgagacagagtcttgctctgttgcccaggctggtgtgcagtggtgcgatctcagctccctgcaacctcaatctcccaggttcaagcagttctcctgcttcagcctcctgaatagctgggattacaggtgcccgccaccacacccggctaatttttgtatttttagtagagacagggtttcaccatgttgcccaggctggtctcaaactcctggcctcaagtgatctgcctgccttggcctcccaaagtgctgggattacaggcatgagccactgcacccgactgtgtatgtattttgtctatagaaagatttcaccttccctgctcctgggacaaaggaaagggctgtcttctatgtcctctctcctaccttgatgggccccaagatgccatttctgcctgtcctagaagtgcacaaagcatttgactgaggctaggtcctctctctctgatgatctccaggttcaggaattccttgtcaggcttggtcccgagggcccagccagaccttacaggggtctcactccctctctagagtccctgcctctttgggtggtgactgcctcctgttcccctgccatgtgatccccttattggtgctcatctttacccctgtgggtttggagtgcccagtcgggttctcggcttcgtcattctgaatggtggttcagagaggcccaagcctagctctacaggagtgggaggaacctacctggccctaacaatggtacttccagcagaagctgatggaggccccatgagcctctgtgaaacctcactggctgtggggaagggagtggtgggctagcctgggctgccctggatttcactcagggaagggagggtcacactgtgaccctgagccccaagccctccccttctccccctgcccgcttctgtcatattccaggggcggcttctcttcctctcacacccaaagcttaggacttgcttttctgccccttcggtctaagttagcctccttctcctaatcactaaaaaggaaggagaaagccgtcacttcctatgccttccacttcagcttctccccaagcaagctcaaagtccagaaaccaccaccagaacttggaagaaggccatcaaggagctggccattgttgtcacccccaggatcccttaggactcagagggcagagccaagtgggtggcaggagcgctgcattcctgtccagacaccgaaaggcccttggggtttttgaattgtcctggtggagcccagggtatctcccagcctcgccccggggtgtgcttcagcctcatagctgctctgcttccctccttagaaacatggccggggccaggtgctgtttgacctggtctgtgaacacctcaacctcctagagaaggactacttcggcctgaccttctgtgatgctgacagccagaaggtacctgggctagggagcagggtgggacctgctcttccgttaggctcctgtaatcctggccacccccaacagcatccattagtgctcaaatcattaagcatcttctgtttgcgtgtccccaaggctcaaccagccctatccacctgcggttccctgtctcagccatttcttggtgacatacaggtcacccccagatgagaatttagagagccctggtctggctgctagagttgctgggggagctgaggagctccctgctagagcttctcccctacccttgggaggctctgagtttccttcttcctgccagtcccattgcagatgcatcacctgctcactgggactgcctcagggcagtggcagctccgggcactgggtccaagcctggtggtgaatcctggccccattcccctcaccccctagtcccaaggaaaaggaaccaagaggcttagccaaggaagggcgttccctacaaggggctgctgaccagccatttcaggatatttctctctctcagcccagtcaggtcctttcctgcgtcttccctctgaagatctctatcttttcttttagaactggctggacccctccaaggagatcaagaagcagatccggagtgagtggcttgttgtgtttggggaggtgggtgggtgaggggattccaggccatgagagccccccttgtactgctctctcctcctttggaaagtgcatttcaggccaggcgttgtggctcatccctgtaatcccaacactttgcgaggctaaggcgggtggatcacttgaggtcaggagttcaagaccatcctggccaacatgggaaaagcctgtccctactaaaaaaaaatacaaaaattagctgggcgtggtggcgggtgcttgtaatcccagctactcgggaggctgaggcactgggactgcctcaagcgattctcttggacctgggaggcagaggttgtggtgagctgagatcatgccactgcactccagcctgggcaacagagcaaaatttcatctcgaaaaaagaaaaaaaaaaaaaaagaaagaaaatgcattcagatccatgagtccgtgtactccacatggcagatcttgggagaagccagagtgggaaggacaagtctaaggcccagagaagagagacgactgtgcagagtcacacagcaggttagcagaggaatcataaatacattcaggacgccagctctagaagggacctgcagagccatctaggacaaaggacaagcagatgggctggaaacagccacccttctgtccaggaatggtgtagtcttcagtaaacaatgaccctttcctcagaggcccagagagaggcagttattacctaaggtcacagagccaaatgttggctgagccaggtcttgaggcctggtcttccaacaccatcctgtgctcttttcaaggcctggggtgaaggcagatgagcaggccaacaacctgtcctttctggcccagagagagaaagcatgtcgggaagggatggggcagctcccaaatggcagaagggggtggtaggtggcctcagcaaggcagcctgagtagttggagacctggcgcctcgaggcagagatgcctccacccagggcccctcccccttggctgtggttggtctctcctgaactccctggtcccctggctggaaagctgtagctgagcctgttaccatgacagcgggcagctgggcccagggatgccagctgactctgcaggagggggctcgaggaattcttcctgaaggttctgtcagttggagacaaagaggcaggcacacagacagagtgcactcctcggggggctgacagatcctccgcctgggcttcaggctgtcccccaggagccccagcctggctgggaggcctgtctctcatgactaaagggatcggaaaacatataggcagccgagtgtgtggtgtttggtcaggaccaggagcttgggaaagacaggtggctggaccaaatggtcaggtctcagcatccctcccagaggtggcctgcagcccctgccagcacagcccaggcctggtggatgtcactccttgtagccatcccaagtcatcgagtaagtcttgatcgctagcaagtaccttatccaggagagccacagtctctgcctctacccctgtaacttccagccatttatcctcatcctaccttctggtgccccagtggagcaattttttgccctctgtgacagcacctcagccttctgaaggtggtcccattggtccttgtggcctgagcttcagagttgggtgtatctcctcccaaacctcagtgcacctggggcaaggtagggcaaagtagggcacctgggacaagctttccacccctctgggcccctgcttctccttggccagtggattagtagttcctgcctcatgaagtgggggtgacagttcaatgacatatgtatggacagcaccaagcacatagtaggtgctcagtagctgttttcttcttgcttccctgaggcaatctggtgtgatggttaagcagacagacactgaggccagactgcctggatttgaatgttaactccacctgcttcttgtgttgactgtgccttggtttcctcctctgtaaagcagggtagtgctagtacttatatttatgttgttgtgagggttaaatgagtattacatgtagaatggtgcctgcacacagtagcacccagtatgattagctattatttatttttattattattattgattattaccattattattcctgaggtaggaattcctgagaccattgttattcattgaagctgctctttccaaggagtcggtgtggtcaggagcctgggctctggggccagatggccagagttaggatccccattctctaccactgactagctgagtgaccctgagagagtgacataacctctcagaattcatctataaaaaagaaagtcaacttcaggatgattatgaagatcaaacccctgtacatgtgcataaagttcttagcaagcacagtgactggcatctagtaagagtttgagatgtgacatctgtatggtgcagatggtggttaccgcagagacaaggatggtagtgatgatgtggcctccagtggtccatgaccacagccctgccatggatgggcctcgctttctcactttgtcaggggccattttgagcctggaacctgaaatgttccaggggtgggtggtctgaccattgttgtggatatgtagactttcgctaattttgtccagtacctcatatctacctgccttcatcccctctcaagtgaccaccccttctctgggcttgcagagcttgcttccagctataacctcagcctttattcccctgtgtatcttcttagatgtgtgccattggtttttcacatctaagtgtggaggttagcatttatccccctaaaatatccctttgttacatttagcccattatatttaccttttaggtcttgtttataatccaatcctgtcttctggtcttgtttataatccaatcctgtcttctgagatggagtcaacatgatatagggcagagttttccaacatgtgttctgagaaacattaatctttcaggatgctctgtgaaaaatggatacaacagatcaaatcatttttggaaattcttgaatgcatgttcccctcagagagttgcagtgcacagtagcagggtgagggctctgacaagtccaaatttaggaaacctgtttaatgtattatctagacttttttcttatcattaacatcctgcaacccagactaggttgtagaccaaggagccaggtggcctgggtttgaaccccagcattgccacttccaagcagggtgaccttgggctaatttactgcctgggcctcagtgtcttcatctataaaatggggctaatcataggacttactcatggggttgtggtgaggtttactgaagtaatgtttgtaaagcaattaacagtgtgcctggcatgcagcgtcagttttctttctttctttctttctaccttccttcctactgctagctcacgagtctcttaacttgggcctcagtttgctaatctgtcaaatgggaataatgttccagccttcctgattggattgtcctgagattatacataggagaaactttgaaaaactgcccagaggatggtgcatctggaccacccagtggggtgttagggcctcgctgatctctctcccatctcctctcaggtagcccctggaattttgccttcacagtcaagttctacccgcctgatcctgcccagctgacagaagacatcacaaggtgagggctgtggagggagagacaggtgtgctggctgtgtgggactatggatgagggaccctggccctggggacacaggcagtatgtgacagcagctgcaaatgcagtcgcctaccgaggtcaggcagacagcatcgtacacaggaagccgactcattgtaagaaacacagtgatgcaagcacagtggtcagtggcagctgacccttgatgtcagaggaggaggtatcacagggaactgtggggccttttgtagatttaagaggacagaagccacctaaaacagttgctgttcccctccgggccatcactgtcatgtaggaattgggcctgattgttgaaatgaacctagagattaaagaataaaaaccacagttctaaatgttggcaacaaatgcaaactttaaaaaaacatagcatgggccatctctgggtgggacataccaaacccatgtaaaagctgctgtgctgggtgagccaccagtttgcagcattgggagtatggagagggtagaatgggatgcctttgaacgtagaactttggtctgcatgccactctgtgcacacatcaggcacatggaagtcaagtggggcttaggactccccacagagaaaagcctgggctgttggggcaagcgtggactgtgtgtgcagtctcgttgtgcctcagggccagtagataacatggcctgaagattggaaatgagtgcaaagcatccttcaggatgagagcttccgtggggttatcccatttctggaaaccagaacgggggaagcccttctcttaagccctttccaaagagatagtctcacttcatgatatcctggggctgtgtcatccaggtgatgggccttatactcccaacataaaatatgggcttggagttcccctacagcaggggaagggctcctaagccagcccctctctcccattgggtccctccttcatcttcatgttgattgcgtgtttgccaggccatcgaccaaaggtcaaggtgctgactctggccttgggagataagacagatgttcctggaacagatcaggcctgggctttggcgtcattagtcctagttctgagccctgaggtcaggtgcgggctaatgtggcagcagcaagatctgaaactccattcccaagtggactgtgtaggttaggccagcacagcctcaatccccctggtcttccctactgatacctctcctgtttgtgccagacactgggcactgtgcttccagggacaccaggaaggaagttaggcctgcctagcacagatggccccaggagatgggtgctatagcagctgatttcgccaaaaatagttaggcccgaaataaactggtcaaaatgacaaattgattgaaatgaaagattggtcagaatatttggcagtgatttctgaattttgagacttttgaacagaatgcccataagcctgtactcggtgcctgtgatgtttgagctgctactgattctgagtctatgccttggccctgggcgcacactgaggctgcacatactttttgccaggacttcagttctgactgtgaaataatgtcaccaagtagtaagaattattttaagtaaaagatacttaaaagaaaaaagcccagatatggtggctcacacctgtaatcccagtactttgggagacaatggcaggaagattgcttgagaccaggagtttgagaccagtctgggcaacgtggcgaaaccttgtctccacaaaaaatacaaaaattagctgggcgtggtggcatgtggctgtaatcccagctactcaggaggctgagacaggagaatcgcttgaacctgagaggcagaggttgcagtgagctgagatcgtgccactgcactccagcctgggtgacagagtgagactccatctcaaaaaaagaaaaaaagaaaaagaaataggcagttgaaaaaaaatggtgaaacataacaaaaatggacagggaggcatcgttggctaaaaatgaaacttttttttaatacatagtaaccaaaaaagcaataaaaatggttttaaatggttctaaaattgtaaaatcgtccaactgtgcataaaagttataaaaaatcatggcctggtagttggaaatgtttctttaaaccaatttgttttcagacaatttacttagagctggaggcaaaataagaaagttttgggaaagcattggcaagcaggttcatctgggacatggaatacaatgtggaagttaaaatgaatggggtagagtcacatgtgctgacatgggagggctctaaggcctgggtatgaaaaagtgagctgttagaatcagagacagcatttgatgccatttacaggtaagaaacacccataaatcaaaaccacatacatttctggtcatcaagaggaaatttagagtcacctctaaagtgtgaatttttccacaacatgaatacagtatattacttgtataattaaaactatacgacattttgtaatggacaaaccagcaaagtagtcctatttagcttgaaattgagttagaaattgaaaatgctgtcataatagaaaacaaatccctcaaatttagaaatgcacaaaaatgcttaaagtcatgtgaaatgttgcaaaaccatctcatgagacatacccagattgtcaatatatgaagcgccaatgtctacaaacacacttttctgctgagctatgttctatttagttctgatggacagctgtgcttgggggatctagggaggagtagggccctgtgcccatgctggctctcccctatctccagatactacctgtgcctgcagctgcgggcagacatcatcacgggccggctgccatgctcctttgtcacgcatgccctactgggctcctacgctgtgcaggctgagctgggtgactatgatgctgaggagcatgtgggcaactatgtcagcgagctccgcttcgcccctaaccagacccgggagctggaggagaggatcatggagctgcataagacatataggtaagagggtgccagccagggccttctgtggctccttggccagtgggagccttccttgcaggcctgaatgtcctaggccgccacatactgtgctgtttgtaccccgcctggctctgcccctagcttgaggtatatctaagagcaaatcatctctgtaaataggaacgatagtgactggctgtgtggccttgatgaccttttgggacccaagtttcttaagctcctctataggtgtgataattccctgtccttggcctctgagaataagtttatctgccaactggagaaaataatcgctactgtgtctctgagtaagtgtcctcatgtctagatcttggtgtagagttcaaaagtttggacccgaaagccagcctgctagggttcctatactggctctgccactttctaactagaggatctcaggaaggtcatttcacttcctatgctttggtttcctcatctgttcaaggtggatgctgttaaacccaccctgtaggattgttgggaagcctaaatagcacatattaaaggcacactgcatgttggctgttagtgttgctgtctgtggatcgaggggttgaacagttgatcatgcaggggaaagtacctcgttccagcagttggacgataattaactagtgtgattgtaggctggttatttaacctatctaagccccatttttcacctgtatatgcacaaagttagattatcagtgtctctcaactattggcatttggggcaggagaattcattgtgcagaatgttcagcatccctgggacccagtaaatgcccataacaccttctcagtccttgtaacaacccagatactcccctttgccattgcttctgtacaggttcccctggagaggagcccttggaactaaatgatttgtagggtccttttaagctggaagtatttggggctgtaagtccaggattgttatggggactcaatataattaataatgtgaaggtgcattataaactgtaaagtgcggcacccagggaaaggagtatggtgatattgtctcattactattgaggatggagggaattaggaggccttggttctgtgggcgttatctggagaggagggctagagtcagatgtggagggatcgtgtacgtggggaagagcctgctggggtgtgatgaatgctaggtcaagggtggcaaatgctgtctctgagagtcgcacactaactccacttggttaatagcgactgctgtggtgttgtgttgagtaggacactgattccctacaatgcccaggttagcaatatccacctgggcataggaatagggagtagtggcctgcctgccatctatttgtcatccctgtcctagatagcaagacatcttaggatttgcaagagtcataataattcagagaaagatgttcagatcaatatgggctggagaaatactaagggctgtccctaaagctctttggacctaaagcacactgacatctcgtgtccaagtatcccacacagcagcccagaggtagacaggtcacaggaaactgaggcctggaggatacacaagacctgtaatgaagtgattaggagcataaactctgaagtcacattgtctagattcaaattctgactcttcttcatagcagtgtgaccttggacaagttactcaatgtctctgtgccggttttttcatctgtaaaatgacaataataataatacctatcttacagagttgttatgaggattcagtgagttaatatgtgtaaagtgcttagaacagtaaccagcacatagtactcaataaatgtttgctgtgactaagtataaaatgtagtccaagtttcctggcagccaaagcaaagaaggaacttgattaattacataactcttctttttggaaaggagaatgtgcacctgttccttaggagagattaagtggcttctgatactaaattctgcaagaaatatcctgtgtgggtaataatttaggagcccctgggtgatgataatgaacaatgtccgtaacaatggttttacagtcatggaaaagtagaatttatagctcacagtcaactcagtggcagaatgaggcaaaaatcctgactcccagctcagcctttgtatgatccctggactaacaagactggacttgagctttggcagaagttgggggttgggtgggctgaagtgggagttggggtacaccctcctgctctgagggcagagggaaaagattagggtgaggctcagcatatttgactttctagaatcatgggttctgatggtgggcacctttggacagcaggactaaacctgggcctttcccttggtcacctgtgatcactttctttccctcagggggatgaccccgggagaagcagaaatccacttcttagagaatgccaagaagctttccatgtacggagtagacctgcaccatgccaaggtaccaccagcttcctgggttcccctagtgtctgggtggtgcccccaaagaactatcaggcctttccctagggcgtggtgtgccagaccctgtgttacctccaacttgaaaccttttctgttctcattctcatttctcgaagttccataaccttttattttctcatgatctgtattattttctccatgtattttatttatgaacctgtttgagccactgctagattgggagcattgtgagggaaagacgtaggccttagtttatttctatatccctagcacctggcacatagcctggcaccaagtgtgtgccactaaatatttgctggatgaatgaacgattgagtgattgacagagcaaatgatcaaacaagtgagtgggtgaaaaaaatacctaaatggatgagtgaatgactgaatgactatgggagggattggtcagtgggactccagcatggaggctctaaccctgttcctgagagctcgttacaagcagcgcacagggcagtgttttcggggtgggtggtaggctgtccccaggcatggaccccgggcctcccattccatggtctcttctcatgcaggactctgagggcatcgacatcatgttaggcgtttgtgccaatggcctgctcatctaccgggaccggctgagaatcaaccgctttgcctggcccaagatcctcaagatctcctacaagaggagtaacttctatatcaagatccggcctggggaggtgagtctgccttgggaaacactcctcctcaccggaatcaactagaatggagtggaccctggcagctgggcctggactgccaacacacacacacacacacacacacacacacacacacacacacacacacacacacacacacagagagagagagagagagagagagagaggagtctaaataaaagtataaccacatatggccaggtgcagtggctcatgcctgtaattccagcactttagaaggccgaggaaggtggatcacatgaggtcaggagtgtgagaccagcctggccaacatggtgaaaccccgtctctactaaaaatacaaaattagctggcactgcactccagcctgggcaacagagcaagactctgtctcaaaaaaaaaaaaaagggagaaaaaaaaaagaagaaatataactacatacattcaggtcacacagataaatgaatacatgtctgtgtaaagttcatgtatttaggtgttgtaagtatggaagtttgtacacattttaagatacacagactcgactatacatacaacacacacaaatgcaaacatgtatatgtctacacctcttttccttcaattacctacatctcacccatcaaaaagcccatttggttgtacctgtagaataaacatgaacccatttgcttctcttcctctccatcacacccgcctccagcatcccccatcttttgcctgtgcctatgagggccttctccctcgcctctggtgctctccaggtcattttcctcatagctgctggagagatcttaaaaagtcccttaaatcagatcatggcaagcccactcccccttcccatccacacccttgcttacacctttcaggaactctctttagctcttgagctaaacttcaaactccttccatggccacctacctctcccacctatcccttgccacactgccccatgcccaaggtgctttagcctcttcggccttgagatctttgaataagtcgagctctttcctgcctgagtgcttcgcatttgatgtttcctttacctgaaagtatctccccctctcgcttctcacatagctggttccttcccattcttcaaatgtcagctcaagatcacctagatctaggtctagaggggatcccctgctcttccttagatgacaggagcccctatgccttcccagttctgctgcaccacacatctcccttcattccccttgtagccctgatcagtgtctgcaattatcttgtttgcttatttgttattggaggtccccttcccctactagaatcttctgccttggtctccatgtatctctagtgtttagcactggacccgtcacagagtaagggctcaatcacccttattgattcagtgaatgaacaggccaaagtcgcagatgcctgagaagagttcagaaagaatgactcacgtctgtaatcccagcattttgggaggctgaggtgggaggactgcttgagcccaggagttggagaccagcctaggcaacatagtgagactcattctctacaaaaaattagctggtgtggtgtcgtctgactgtagtcctggctacttgggaggctgaggcaggaggatctcttgagcccaggaattcaaggttacagtgagctatgattgcgccactgtactccaccctgggcaaatgatcgagaccctgtgtctcaaaaaaacattaaacaaataaaataaaaaacacaaagaatgggctagtggcgagagtgagctcaggccctgcctctaacctgcccttttggttttccagtatgagcaatttgagagcacaattggctttaagctcccaaaccaccggtcagccaagagactgtggaaggtctgcatcgagcatcatacattcttccggtgagcctgaccttggatggggtaatggggatggggcagaggccatgtgtatggaggggagcagggggaggagttagtgagaactctaggaaagtcctccaccctttccccaagtccctcccttcctggaccactttgaattgttgtagttggtggagtagtgggatgaaaggccagctgtggtctaaccttgggcctggcagtgcaggtctgattcctcctcctcccctgcatccctctgctgcaggctggtgtcccctgagcccccacccaagggcttcctggtgatgggctccaagttccggtacagtgggaggacccaggcacagactcgccaggccagcgccctcattgaccggcctgcacccttctttgagcgttcttccagcaaacggtacaccatgtcccgcagccttgatggaggtatggcccaaattggagggctgggcggggaatggtcttcagagggaactgggggagtgggcatgctgggttctgcagaatgagcaggaaaatggtagatgcatcccaagttcatctgcaccaggctggcccctcaagaccagtgctgtccctgggcagctcttggtggcttagtcccaacctagagctcactcccacttgagatgtgatactaccactctctggattccccacaacttccctgagtcgtggtcttttggggtcccaggtttagccatatggtttgggccacctacccaagaagcttagcaatccaccagtctaacctgtggtctaaccttgggcctggcagtgcaggtctgattcaccctcctcccctgcatccctctgctgcaggctggtgtcccttacactggtcatcatcatactaggagaatagtgtcttatgactgcagtgtggagctgatgatgccttatctgctgggaggccagggcatcgttcttggtcattcttttggttctactaggttctgggctgattgacaatctaaccacatggcactctccactgtccccatttctattggattgatgggtgcccttaacatcaatgaaaactggccctatatagtcctgtagcaagcagatagggcttaaaatgtggtgcacaaaccacgtttcatcagagtcgcctgtgagattgttaagcaagcacgaaaattcccaggttttgccccagacctactaaatcagcacccttcagggcccaagtctctccccaggatgtacacactagagtttgtaggtgatgttcggaagtcacatgggtcactggggagattcagaattatgcagatctgagttcaaatctcggcttgacagtcaccgtgggctgttctctggacactggaagtggttcataaatatctgaatgaatggatgggtgaccttaagcaacttatttaactccctgagcctatttcctcttctacaaaatacatagtacctactttgctgtgttctagggaaaactaaatgagatcatgcctagaaaatattctgtggcacatagtagcaccttaagaaattgtacccatcattattgtttttaggtttgtagagagtggcttaaaggtgggaagtgggggctgggcatggtgactcatgcctgtaatcccagcactttgggaggccaaggcgggcagatcacctgaggtcaggagttcgagaccagcctgaccaatatgatgaaaccccatctctactaaaaatacaaaaattagccgggcgtggtggcatgcacctgtaatctcagctactcgggaggctgaaacaggagaattgcttggacctgggaggcagaggttgcagtgagctcacaccattgcattccagcctgggcaacaaagcgagactccatctcaaaaaaaataaaaaaaataaaaaataaaaaggccaggcacagtggctcacacctataatcccaacacttcgggaagccaaggcaggtggatcacgaggtccagagatcaagaccatcctggccaacatggtgaaacctcgtctctactaaaaatacaaagattagccaggcatggtggcaggcgcctgtagtcccagctactcgggagctcaggcaggagaatcacttgaacccgggagatgaaggttgcagtgagccaagattgcaccgccactgtactctagcctggtgacagagcaagactccgtctcaaaaaaaaaaaaaaaaaaaaaaaggtggaaagtggggacttgggtagggaaaccgtggatactcccagaacaccttggggcaggcctccaggcaagttagttctacttatattttctgagtgttatatgtgtgccaggccttgtgttgggtcctgggtatagtatttagagtgaataggtttggtcctttcctttgaggagctcatagaatagcaggtttgtaagcatttgttgtggttcaagcaatgggaaaagcatgtgtagaatgtagagtagccatgaggagggaggaattaagtctagaagggacagaaatggctctgcagaaagggtgccaactgggcagggtttggaaggatacctaggagtttgccaggtgattaagaaagtctgatactttgtctggtatatgaaaatgagacctgtctcaggactcctgtgcatgtttgaaagatgtgtagttctgctagggttcatctgaggctgaagaagctccttcttctccttgggtagacagaggactgacaactggggtttatgcaaagggaaaggtccctcccctgtagcttccattactatgtcaggagccaaatgaagcccagattctggcaggcagcagaggttagcccagagctggtgaagctcatcggagaggagcagaagcatggactctaagctaggaggccttggtccctgtcccaactcaccaaaaggtcaccagtgggatatttcccctcttgatgtctccagtcatcctctgtaaaatggggataagtcagtcccattccagccatcaacatagggtattgtgtaaatcaaacgaaatatatgcataaatgcgtactttgcaaagtgagtgtatatgaatagaaaggataattatcctcttttaaaaatctaggccaaccccaaggataatctgagctctggttattttaaacccgtgtttttcagcctattttctaccaagacacaatccacgggcatagtcggattatgcccaatgcgtgatgcgaagtctagttccaccccttcctttcctattcagaaaagcattttggaataccagtgagtgagaaaggtgttattgcaggcatctccctgaattctccctaatttataaagaaggtaaatcagttgcaaattttaggactttagctttcactagtaaagctagtctcacaatatttgtgtgttgctaaatgatgatcaagtgagtattctaccacaaccaccacaaccaaaacagcaacatttatgggctgccattgatggaagcctcactctgtgccagccactcttccataaatatttatatacattagcttgttcattcctcacctccgctttctaaagcaggcactgcttctagatgaggaaaccaagacccagcaatattatgtaacttacccaaggtcacacagtcaagaacagatggatttgagatttgaacccaggctctagtgctgtagaaaccaggaaggagtcctgggctgggaggcagctctgccactcactggccatgtgatcagaagtctacttcacccctctgggcaatgggtgaggggtgtggaagagttggctccactccaggcgtggttgggcagggctgggctggttctctgtctgttctctgggaggggtctcacatggttgcctggctatctccacccacttcagcagagttctcccgcccagcctcggtcagcgagaaccatgatgcagggcctgacggtgacaagcgggatgaggatggcgagtctggggggcaacggtcagaggctgaggagggagaggtcaggactccaaccaagatcaaggagctaaaggtaggagcctggctttctcatactctctgccctggggatcaggaggctgacctgaggtctagcctcggccttgaccttcacatgcctccagctgtggccaagcacccttactatggagtgcaccatggcagggccttgcctttgggtcatctctcaatacctggcccttgccgggatggggtgggcatgggagtgggcatgctgcctgtcctgtactctccccagctttgccctgcttttccagaggggcactctgtcccctagaggactcaggcctccttttgcacactcttaatttgcccctctgactgggatctggatctgcaccactctcttcctcctcagagcatgaccaggtgtcaccaacagctctaggagtgtgaggttcaagtgtgtccccttcctatttccccatgccccactcaggtgcacacacacagtcccagtatctgtgtgtacacgctcatgcaggattgcatgacctcagcctcacactcacttaataacagatgtatgcacccgtcacccttagatccatgcacacagatgtgcaaacaacatgcacacacacaggtgtgtgcacacacaggccagggagagcttcctcttggtatagttgttcagcaggtttctttccgtctaccttgtgagcacagggccttgaacatgctcccactgacagcgagagcagggaactccattctcacatcccatctgcccagtgtggctctgcccacttggcctctagttcccttctctgccttcctgggacagcaccctgcttcacacctgtaccttcttctgactacctcactgccctgctggtggcccacccagctgccctggcctccacttggtcgagtgtgcgtgctctgggctccttgctggaccaagcccatcgtggtatctctaatccatctgctctactgaccctgctgctttctttccctcctaccacatcccactagccggagcaggaaaccacgccgagacacaagcaggaggtactgcatgggacctgtccctccctacccagccgttcccatccctagctcatttgtcaccatcccacagtccatcccaggctcacttccctggcaccatctcagcttcaacttcatctctgctccccagccatccccctctgcagccgtccttgctccccactccgccacccgctaagcttctctctccagctcccttcttagactctcctggccaatcggccatctctccctcctccctcagccctcccaccctctccccagctcacccggtcctccatacttgcagctcacctgctgaccatcccacctgcaccaccagctcttccaggccattctgtgctttcatttagcacatctcccctgacccaccccttccctagattcatctcctgcccgacagcactgtttggtctcgcctccatctcgtctgtgtcccctgtgtcctcacccctagcttctttttgtatctattggcagtcagatgtgggagtggggattgggggtgggggagggaggtgcctcagagcacacctgcatctgccccaactccagtcctacacctcccccaggcagggtcgactactgctccgctatggcaaaaacctcctccttttctcctcctttcctcgtcttcttcccatttgttgcttcccccaaattattccttccatgttaaccacttcttccctctcacacagtcaccaactcttcatctgaactttaactgcaagagaagtgggtttattcttgggctgccaaggtaaagggccagagactgggacataagaagagccttgccttggagtcctgagatctgggtttcaaccccacttctgccaccaactctttgaaggtcttgggaaattcccctcaggccccagtcccctgtctgaacagcaaagcattcagactaggtttctccaatgcccttaacctttagggatcccaggaccccaggatcccactgctccctacagccttcagggacataacacacccacggaggcagtggggcaggtttgtgatggaagacgacaagccacatctcaggttgggactcactacccattgcagcccaaaccctctccctgtgcaagcaccatcaggtttgacttctcagacagccatggtccagagggcagctcagcttgggaagggatgcccgaggaacagacagatgtctggagggaaagcaggagcctcactgggattggtttccttcctgaggtagcttaggagtcagccatagtggatccttgggtaccagagatgagcccaggggaagattctagctttgtccaagggtaagcttaccttccagtggttcttccagaattacctgatctgactttaataagctgagattgtccatttcttgtcctgaattgagttaacatgaatttttaagcagccttgcagataagcgtccttgggctgccagccaccactttgccccagaagtagccagataaacagcttttggcaggtccctgccagctcctgcacaaagctcgtcctcccttgacctaaggagatgactctgtcatgctgcactggctgggaacactacccatataggtagaatcctacaactctggctatacctggctcaattcttgtgcccagctgtgggacttactgctcttcttcctggtctctaattctcctaatcttcctgaacactccacagcattctagtttctctatctggctgtatctcaccctgtctgctattggtgagtcagtacctgaaaggtatctggaaggtccagggtggttggggaaggtagtgtcccatcacagaggagactagatgcaattttttcctgcccctggtccctagtgtgggagcttggccattcttctggatgtccctggcttgaggaggatctgtactgtgggcctccccagggcctgagcagttgtgcatgttgggctaggaggggcccagactggacatcctgttaagtacagtggcccaagtctcagccagaaagtggacactgggatccaggagggatctaggaggcacctgaatgagtcagagcagcccagtgaataggattagtgagttattatagctctctggcagttgctgcctgctatgccttagttgtaacagagggaagtcacctctgtgactaagaccgggcttatagcaccacagggaactcacccagacctgtgggctttgggtagaggttggctgttcagaggctgtagagccaggcaagggagaagcgaaggtggcttgactagacatctcctctttttcatcttcagtgctctgtgccttgggatgtgcacctgttggggtggttctccttgccctggtttgtctctggggctgccatgagagtgacacaggtcagagtgggaataacgttgctggtggagggtggtgatggtgactgctgccatcatccctgcaccctgcatccccgcttggagctgttcccctaacaccaccaccctctccatctatccctagttcttagacaagccagaagatgtcttgctgaagcaccaggccagcatcaatgagctcaaaaggaccctgaaggagcccaacagcaaactcatccaccgggatcgagactgggaacgggagcgcaggctgccctcctcccccgcctccccctcccccaagggcacccctgagaaagccaatgaggtaggtgtcgccctgaacccctcgataggggccttgggtaaagagacattgggttgctgcatcctgacttacactcatcctccacaccaatatgcttcccccattgctgcttaggggctggtggggatggagagggtggtagattaggctgagggagatgaattcactaaatcttggaatcctgggtcctggagaccaacttaaaacatgaaaaactcaagactcatggtagcttggcgtactccccttccatcagcccgagtataatggggaaggggtgctggttagaaatgcaggtttcagggccccagcccagacctactgaatcagatatttggactcagtgctggcatcggcatctggacaagtgctgcagaggcttttcatgcacactacattttgagaatcccaatagctctctccagaaccagaccctgttgtgcctattgtgaaaacacggatcggggagtggtccctcctagaaggggcttcggagtccactggaggggaatgggcccttcacagaaatcagacctgcttctgaggcttcagaaaaggatctcacatgacctgcctttccgagtggaaagagtggggtgttttctcgattgaagaagagataaagttaggatttggggaagcactgcatttagactctcaagtcagtatttttagcccttgctaaatcttggcgatatttaccccagtttatacttaggtgttttctccctgaagctattgcttactggtctcaaatacggttgtggtgtagacttgcactgcctgggtttgaattctggctccgctgcctgccagctggatgactttgggcttgttacttaacctctctgaggctcgttgggtagagataataaaagcacctacttcatggggatgttgtaaggattaaacgagataatgcacgtagagggactagcagagtaccttgatgcgcagtgtgagttattgtttcacttgagagttccagactcttccacagaggaggttaacttcaaatcaggataaagaaagcatgtttcaatccaaagtgttaaagtcaagcatactaatttaactagaggcattcacagacgacttttctttaacaaataaaattcccctttcctaaataaaataaaagttgaaagggccctgggaacctgctcagaaccttcattttacagataggggcaccgagacccagaaagaggaaggacttattcagtgtcttagctgatggaagaggaaccagaacccaattttcttgtgacccaggctattgtatgtgctattaaatcacagctgcctaggagcaagaccaaatcacataaagaccaggtagagagtcaattgtatgtgtgctgccctctaatgctttgaaaattggtgatgcacccatgatctaattagcagagcattttattggatcagtgctaccatggcctgaacctgccagataacagacggctttgtctagtaaggcataagtccagagagagctactggggtggctttctggtttgtgagtcacagaattagggatgctttgggggcctttaaggctggtgctgtggaagaagggcagacctctgcatccatgaagggcctctgtttgcctctggcacaagcaagaccctgggctgggtggcggaggctggtctagtgatccagtgaacaacatcctcttctgcccttcagcgtggcccctaatcaatcctgatgtgggctggccaagcttggcctggctgtgggcgaggtgggatgcagaggctactgaaagagtgagtctccagaagagaaggggaggatgagccctgggaagtgaggtctagacctctggagtgtctcagtgtagcctggtgtagggtgtgccccacctgctggtgatagctggaactgctagaagatgggtcttagtaaaaggtggaatctgctccacctcccagccctgctcagccgcaagaagtatagtccactgctggaaagaactatggtccaggagctcaccctggagctatggaccattcagaactggcttacaggcccccttggcatttaggggcctttgaagatttgggagatggggaggtgccatagacaaggattgactggctccttgggtaacttcccctttttgagccgcattgcctagtccacctacaggaggaccaaaatggtcattccatagggtagttgggaaagtagagtgaaataattaatataaaagcactttctcaactggaaggtgctgggcagtcatggggctgttgctgttggtgactagaatccctgatcccaaaatcagttttgtggggggcatcctgaagatgcctgtgtcatccagaattcctagcagcctcctcgtatattgttgggcctcatctgggccaaggggaaaacagagggaactctaactgttcccatttgccaaacccaagtttcagtgtttaaagggggctgtaatccaaactgcagggttgaaccatagcctaagccagagacatctggagccagagtctaaatgatatggctccaacatctctgaatgagagtgggcaggccatgggggaagggcactggggctgactgtgggcctccctcccttaagtggctcagaagggcagtccctcccgagctcaccccacagagtggctactccctgacctaatccacaaatcctacagatatgggacttaaaaagctgggctatttatggactttgtgtgtgtgtctctctctcctactttttctctttccctctcttcctgtctctgtctctccttcccttcctccctctttccctttcctctggctctgggcctcccctgcagtcccagaggacccaggacatctctcagcgggacttggtacctgagcctggagcagccgcaggcttggaagtgttcactcagaaaagcctcgcagcatctcctgaggttactgtcttcaccttcctgtgccccttcctcctgcccacccagaaccaccctctgtggtcttaagaaaaccctttctctggggtgaggggaatgtaccagattctgccaagcagttggaagcaatgggtaacccatgctgtctccatgctgtgataaggaaatgtccccatcccagagatccataaagggccagcccctccctcatccattgtttctcaggagggacaggactgcaaccattctgggaagacagaacagcctgcattgcctttggcctcgaaggagaggcaggaatgatctccctctttcaggtcctggtgaggcaggtgactctagaggcaggccctgacttctatgcttagggtcaggggtcatgctagaggcaggctctgacttccatgcttagggtcaggggtcatgctagaagcaggctctgacttctatgcttagggtcaggggtcatggcacccaaatgccttctgccttaaggtcttttctctgttcagaagcctgaatggtctagcagtggttagttagggcacgacattccaggcatctccggcctgcgtcttctctgaactcccctggagcttgggcccatcaaggaggcaggcaaaagtggacatctttctctaaggagtatccttagggttgtagagagattggtcaggcaagtgtttgaaatgaggaggccattgcttctatgcccagggcggcagcaagtggagggctctttgaacttcctgtggcccttcatggatgctgggcatagaatccaggcccaggcaggaggctgtgctccctcctctgatgggattttatggactatcagggttggaagctactgagcgatcatctgggcagaactttcttccccaatatctgccgctcccctgttgatgtatgctctcctctgagggcctgtacctttctccattctcagagaaaacttctttagctgctgcaaacgtgctggaactttaagaaagacataaatgagctacataagtgataaaacataagtcatacttctactctatgaatttttcctcaatctaaagaacaaaactatccgcacactctcttgagggaaatcggacaagagtcaacagcataccaaggacagggctagagagatgccctggacacagagatgctcctgtgaccaaggacaggtgcccatttggggagcagagcccacaacctgcaccccgcccccgcatcattctcctgcaaatgtccatccagctcttccacagcaggcacttttgctgtccttggcggcagcccattaactattgggaagttttcgtgttgaattgaaatctgccttttcaaattagcagcctgtaggtctcattctgcccgctggtgcccgctaccgctctgcatcctcctccaggccagcccttcggagacttgaacacctccccttccctagaacacttcactctcttcccactttctcccaggaaatggtttctggagggccccttaccctggaccccctcctcgtataaagggcaggcctggctgggcatggtggctcacgcctgtaattccagcactttgggagactgagttgggtggatcacctgaggtcaggagttcgagaccagcctggccaaaatggtgaaaccctgtctctactaaaaatacaaataataataataataataataataagctgggcgtggtggcgcgtgcctgtaatcctagctactggggaggctgaggcaggagaatcgcttgaactcgggaggcggctgtcagtgaggcaagatcacgcctctgcactccagcctggaagacagagcaaaactccgtctcaaaaaaaaaaaaaaaaaaaaggcaggccccaaaatgtgacccagagctccaggaggggcctgaacagcctggagtcaggagaacagccaggctggagagtttcctgtctgtgccttgggtgcagacagctgtgagcccaactggctctgtttctccccacccctgttgccagcttcctttgctgcagtgcccctacctgacggcagggggcgctctgagcaaggcaccgacggtcccctggctccagaaagaatggctgcggggctgcggctacctggggctaccctaagattatcccatcttgtgattcgggttagaacgactttcacgccaacccctcgggccaggtgtgtggctctacccgtgccttcgcaccgtggaagtttttttcttttttgttcagttttcttttcctcttcaggatcctacattttactttgtcccccgctgctcagcctgtgatcttgcgcatggcctctcccctctgggataccgtttcgccttctgaaataaggataacgatatctgcttcacaagttgccatttggattaaatttaataactcagacaaagggctggcattgcctggcacatagcaactaacaatcactatacgtttcccctttcttcctgcagagtctacttttcattctctgccagcacctgcgccactcactcttgcttatctagcctagttgctagttagaattggggcaggaatgttccagaaggaggcatattgactggctttggccatcattgccaggcggatgtcagtacagctggaatggaggcagctgaaggaacctgcttctcaaggaaatgagcaaaaggacctagcttccgtaggctctcaaagcacgtccctttgggatggttcaggagctgtggtcctgaagccttaatgacctgaagtaaaagctcagaaacccaccccagactttacctagaccttccccccttccttttatctcgctttcccatgaacaagattattttaatgggttctgattccctgacagagagattttctcaaaacacagtggggacagagggtttatgatgctctcttgagccttcaaaatgtttcagatcttatgggatctgacagactcctcctccctgtggggtgggattaacagactcctcaccaagtcataacctgaaaaggagcccaaggtcatataaaccttccccctcctgctgccaggagaagttctgggcatgtctccctgtggaggtggtcatggtagggtggagaggacacacttcacagaacttggcgtcagagactgagttcaaggcctgcctttccacttgctccctgtatggccttgggcaagatgcttctccaggtctgagtttccatatctgtatcacgaggggctctagttggggcagtgaggagggaggtacctcagggcattaaggccgcccacacccccaactttaccagggcagctctgtatttctgtcacatagccgacttgcattaaaattttgtgggaagtatcctgtggccacaagatgaaaaacccagtgaccttcctgcttttctaaccaccctagaagtccatcatccctcccaggcattgtttgaagaactcttgggggaggtagaggctgttgggagatggcctaacagtgctgcgatctggtgcttttttttttttttttttttttttttgagatggagttttgctcttgttgcccaggctagatagagtgcattggtgcgatctcggctcaccgcaacctctgccccgcaggtccaagcaattctcctgcctcagcctcccaaagtgctgggattacaggtgtgagccaccgcgcctggcctttcttttttttagacggagtctcgctctgtcaccaggctggagtgcagtggcacagtctcggctcactgcaacctccgcctcccagattaaagcaattctcctgcctcagcctcccaagtagctgggattacaggtgcatgccaccatgtctggctaattttttgtatttttagtagggatggggtttcaccatgttggccaggatggtcttgatctcttgacctcatgatctgccagcctcagcctcccaaagtgctgggattacaggcgtgagccaccgcgcttggcctctggtgcctttgatgcacgatgatgcttagatctttacctctctcccttccttgatgcattctattgagttcttttctgctctttctatgggttttgttagaattagaatgggccctggtatttgtttcttttagattgaacaccacagtgttcaagctgtttaagccattgtggtgcctggcactaacgtggtcatgtggtatctccatgactactatgctttcttcccagaagcccttgtagaaaggttcgatttcaggctgtggcctgtggaacttaatgcatcccttcaatttgccattaggtcacagttggcacccatattccatggttgtgaaataagttagcaaagatctccggcctcaaaaatcaggctttcttttcctgactctgtcttctactaacagtgaccttgggcaagtcactgtccatctctagacctgtttcctcatttacacaatatggaaatgagactggataacattgtaagagtacttttgactctaacattcaaagactccatgtgatggaaatgactttcccctctgacggtggcagttatgttattaaaagaggaagaggaagggtcctggcccatctgtggatctccatttccccatggctgacatgggaagggcataagaccccatcccattttatcaagttgggggcagtggttgaggaaaattggtcaataatttatcaagtgcctgatgggaagagggaccttgatgagaatggctggcacgtcatgccttcctctccccagccagttctggggatgtgctgtcccaaagtcaaacatttcagtggtagattggtcccctcttacaaagggaaaaactcacccattcttcaggtacctgatatttcatgttaactcttcttgctccaattgaaacacagggttcagagcattgggtatttatagaaagagagtacactaggccagaagagctcggtctcctaaaagtgaccaccatgcagcaggaagaaaggcaggcaggccttgctggtatccttgccaacggcagactctccaaggtagacgttctggtggacaagttcaaagtggaagtggccacagaagaaatggtgggaaacagaagagcaaacacccagcaacaaggaaaaatgattgcaagtcctgaagactttgagtcagtgggggaggaaggcccctggatcagggaaagcccaggaggggctgccctggcttccggccgcacattggcagaaaagctcctcgagggctctgagctcagggcagacaccagagaggcaaccatcaggaaccgctgcatgtcagatggtcagccggagggccagacagagctgaggaaggggctggaggagcctcacacttgtgggagacccactgctccagggaccaggccagcagaggtggacgtcctctctccagcctccgacaagggaggactccagtcgtttctattggatccagcccacgcagaagccagagctgagttgagcaatgaaactgatacttcctttgcagagaggagcttctatttaaattatgaagaaaaagactcagaagaccaagtcctccctccacccctggaggagagaaaagggcgcctggatgcccctcccggaggtgagcccaggccgacgctgaattccttagacctgagggtttctgctgctgcttccagcaggagcaaggacgaagcccacatgacttccccaaaggaaggggcagggacccccaagaaccatggaggacctggtgacctgaagggatctcccgcaggacagacgtttgctgaaggctgggaagatgcccagtggggagtggaaggagagtttccccacctgacagccagcgcagcccgagaggaagggacccccgtgagtggagatttgctgggaaaggctgaggaaagtcccacagaggaactgaagaagcaccctcctcacagaggacagggcgtgcatcccgacccccaggcctgcgcccttcctcgggccatccctctgaatgtcaggaagccagtcaaaccagacagaggcaacttcccacccaaagagaggggagtggttcccacccagaaaggaggggctgagctgaaggaccgcgaggcttcagcatttcttcacatggaggtgatcattcccctgccagcctcccctggtcattctgaggacctggcagctctggaggaagcttctccaagcccaacctcccatgggtcaggggagccttcggagctcagggagccctttcttagacatgtccatctttcgaaagccagcccagagcccaaggaccaagtagggtttgtggtgtcccctgccacaggaggtgagcgcaggcctcctcccatcaccagcagaaagcccagagtagtccctgaagaagctgaggggcgcatacctctggggtttgggttcccttcagggaagcgaagggagatgacctctttccaggctggggaccaagagggctccctagaagatattagcaagacctcagtggccaacaaaattcggatatttgagacccacggagctgaaactcgccgaatgagtgagggtgaagcaaggtcccttccaaatgacgtatcttcagaggcacccgtgggacaagcagagcagcagcggagtacgctctcagacctgggcttcgcccaactccagcccccaggggactttgccagccccaaagccacacattccacagtgatacctctggctaccagacacttcagggaggacacttctgcatcctaccaggaagcacacacggaactagagcccgtgtcccccaattcaggctgtgaaaccacgctggcagaagctactggaactggggtaactggccgcgtgagcccccgcccccaccgctgctccccgcccatgggggctggccgcatgctctgtagtttttagaagcatgtttcagtggcccctcgtcatttctgcaatcagaggctgcttatccatccctgtgagttttttccctaaacgggcctgggtgtagctcaggctgaatgatgggcttctctgcttggcccatgttagcttggccacaaagaccctcagcttttggtgtgacctggtgcccagagggtcacacaacccccatggagaaggtggcgccaccaccagcaaatgacacacctgctttgccttgccgctcatacccgctgggttcctgcctaccttgcttggcttgtccagcgatctttcttcatcctttcccatccctggttctcccgccttgggaaagttgacagtccagaggtttccatccttcacttctggttccctctcagtcccagtgccaagtttctttctgcctccttaagactaactgtcttctctaatccagaacaaatccggagatgcggtcagggaagagaagcgctccaccaacttagcagccaacacccctgggaagggggggcgcctgagatttgccagcccctcgggccctcaggtctctgcagcccctctgtgccctgatgacccagtcaccttcacccggccaggatgcatcgccgccttaggttcccacctgctgtggcagcacctctcgtgctgctcaactctggcttgtctggaatgtctccctcacacctctcaaccttccagaaactggctaaatggaggctcgcttagcaagtgaatgtctaagcccactgaatccctagaaccagaagccaagttctttacaaatctttcatgggtattaggttggtctttaaaaagaatgttatgaaccagccaaaaatgtgtgtgtggtgtttaatccctgacaggccagttgagaggtatgtatgtcggacaagagttgctggttccccgaggcactgccttggcccgctgttgtcaattacactgatgggaccagagcctctactccctgacttgcctgtggtccactcatggagcccagggtggagctggcgtagcactcagctcccaagaagctcgtgcccaaaaggcctgaccctgaattgctcttctctctagtcgatgctgacccctcccccggagactcagtggaattgacaaacatgttggcttcctcttttgttcctcaaagttcttggctccaacctctctgccttcccttcctgggtctccctgaatccctggatctccctccttagtttctgtttctcaacgcccacctgcacggatgggcctggggtccgggcttccatccctgcctttcgtgcaatgctgcttccaataagctcccagatccaatacccttggatggagcctcctgtccaggagtcactggcaggacgtttgctttgtacttgcttttgccatcagtgtgagaccctcagaaaggggcatctccactcttgagtcgtttttgttttttttatgcttgttatgatttcaaggaacctttcctggggtgtttttcatttcctggcctgctcttccattcaggatgtcgacacagccccgagatttctcctgacattcaccatcttgatttctctttctctctctctccccaccccacatccccattcttttgattttatctggccatagagagcagggctgagggagggctccgaggagaaagtcaaaccaccacgtccccgggccccagagagtgacacaggcgatgaggaccaggaccaggagagggacacggtgttcctgaaggacaaccacctggccattgagcgcaagtgctccagcatcacggtcagctctacgtctagcctggaggctgaggtggacttcacggtcattggtgactaccatggcagcgccttcgaagacttctcccgcagcctgcctgagctcgaccgggacaaaagcgactcggacactgagggcctgctgttctcccgggatctcaacaagggggcccccagccaggatgatgagtctgggggcattgaggacagcccggatcgaggggcctgctccaccccggatatgccccagtttgaggtacagtggagcttcctcaagagccaggcccgctgggcaccgcatgctcagagggccctgggccacccgtgagaagaccgagcacccagcctgcagcctgaagctctgtctcgtgttgcatgactgcccctccgcagaacagcatggttctgtgctcgcatgtttgccatctcggtttacccctaacacgcgctccttggtattttaaccctgtgaccccatcgcttgctgaagtcgagcgatgacaggtagtctggtctttcttgaccccatgcccccccacctgtgttgcatggcacctgcagagagcatgcgtctgtggactcttgggggctcctgcagcctggtctgaaagctgaatggtttttcctgatccgggcccaggcttgtctctctggggtctgggcttcccggggaaggggaagcagtttaaatccatctggccctggggtctcagggtggtaatggaagctcctggaagagaggaaatgtggtcattgaggagggacagactgtctctgggcctctctgtggtctcctctgtagagctgtgaagggatttctctaaggcacgcctgcccatatcattcctttgccccctcatctcttctagacccaacctccctcctacactctcctttccccaacattcctggcattgaaatatgagcttagccactctgggctctcacttcatgctatattctctgagcaggtttttttttctccctttcggtgccttacaaacctatcatgttccaggaccaagttcaaatgtcagtttcctagcaggggtttgctttcctgaccaccctgggcagaaatatcgcccccctacccccttgccctgtaatgcctatgctccagcactatccaaagcggtcaggtcagtggctgacaagcctgctctcccaccaggtggcagctcctctaggcctggcatatactaggcactaatagatgattaactggatgaatggctgggttacagggttgcaaccatctataagaatccccttcagccaggcacagtggcttgtgcctgtaatcccagctactcaggagctgaggcaagaaggcagggggatcacttgagcccaggagttcgaggctacagtgagctttgatcgtgccactgcactccagcccgggcgacagagtgagaccttgtctcttaaaaacaaaacaaaacaagaaaaaaaaaatctccaggcacagtggttcacacctgtaatcccagcactttgggaggctgaggcaggtggatcacctgaggtcaggagttcaagaccaccctgaccaacatggtgaaaccttgtctctactaaaaatacaaaaattagctgggcgtggtggcacccacctgtaatcccaactactcgggaggcaggagaatcacttgaactcaggaggcagaggttgcagtgagctgagatcacgccattacactccagcctgggcaacggaacgagattccatctcaaaaaacaaaacaaaaacaaaaacaaaactatactcagaggtcatagtcacagcttgccatacccaaatggaccccacatgctctctacttcaccccagtcctcaacaaaccctcttcactcattgacatctcctgcctggatgctgtaggcctccaagcatgtgtggctcttgctctaaagaagagtccaggctgggcacggtggcccacacctgtaatcccagcactttgggaggctgaggcaggtggatcacttgaggtcaggggttcaagaacagcctggccaacatggtgaaaccccgtctctactaaaaatacaaaagttagccgggtgtggtggcatgagcctgtagtgccagctacctgggaggctgaggtaggggaatcgcttgaacctggaaggcagaggttacagtgagccgagatcgcaccatcgcactccagcctgggcgacaaagggagagtctgtctcaagaaaaaaaatagaagagttcagctgaagcggctgagaggtggtgagctcaccaggatttggtgacattatgtacacaaggaaaacacttagcccagggcctgtcatagagtatgttaatgaaatggtagatgttctaatagtagcctaaaaaacagcatatagccaccatgagggtgtgtggcacaggggcgcagggcaggcctgcctggtcctggtggtggtcctggctctcctcgcgggctatctgtctatgatatcacaccacaactcttttaccctgtccagagtacccttccagagatgtggccagctgtggggataggagatagcctgcagacaccacactgcaattgtctgtgagcaagggtcatgctagggtttcagttacagagcattctccctccttttcctacagcccgtgaaaacagaaaccatgactgtcagcagtctggccattagaaagaagattgagccggaggccgtactgcagaccagagtctccgctatggataacacccaggtaacttgtgccttccaatgtaccctaagcatgggtattgggcatttggtggtagggtccccactgctgtggccaaaccccttggccagctcttttaatctcagcttccctggaacccatatgttaatcctgatgctctcctgtgcctcagtgtcctctctgagctctggggaggggcaacgggtaaagcaggttcctgtcctgggcagaccatacttcttaaagcctccatttagccatccataaaatgggaatgaccctgtctaccccttcctcctgggcatattgggaggactgtactgactagtggattgggaccttggtgttcacattgcttggaggagttggagaggtttcttgaggtatctcaggggctgcttgaggagagaagagggagagatcccaattcagcttcagtcagaatagctcaccttgggtcattttttatgcattagagttccacatcagatcagtaaaatgaacaaagtgaaagaagaaaaccgaagatcatgtgtcttgacaagaagcagcatcctgaccacctggagaaagccgtcaggcataggcacaggcccacgacttccagtccattccctgcactccttccatgctttttaaacttaggaagttaagattgaggatctgatagatgccctcctggtttttcctggccagaagagctacaatgctaggagcttttttgctctgagactaaccttttcctgaagaactgaaataagaccaggcacagtggctcacatctgtaatcccagcactttgtgaggccaaggcaggcagatcgcttgagcccaggggtacaagaccagcctgggcaatatagggagaccccagctctacaaaaaatacaaaaattagctgggcatggtagcacatgcctgtagtcccagctgctcgggaggctgatgtaggaggatcactaaaacccaggaggtcgaagctgcagtgaactatgagctatgattccaccactgcattccagcttgggtgacagggaaaaaaagagagagaaagagaaaactgaaataagacataaaccaatacaacatgggcaattcttttgtttccagatttctttctcccacttttataatgatggtaggagtttatgaggccgtctactacaggtcaggactcttgagttctgatgagctgtgtgaccttgggcaagctgcttcccccactgacctgttttgttttagtaacacgtgtttctgttgtgttttcatacagaaaagtataaagaaactaaaattggccctagatcccacagcccagtaacccttattgacataaaaacaaaacaacaaaaaaagtttatagttatacaattcaagcagaacaaaatgggatttttcttataatatcacccagaaaaaaatataagcctatttcaacacagatacctacatctctatatacttaacaatgtttacacagaagtgatcattttcttacaacttacctttcttcttagtaattattttggagatcactccttgttggcatacatagacccaccttactcttgatcatctcagttaggaggcaaatcttgatttatttcgctgtctcccaatggctcgccctgtgattgtttttgttttgtgcaattcactatcagcgctcgtgaatttccttgctcatacttctcggtgagcttttcaaaggttatatccaaagagtcagttcctagagattgctaggtcaaagattacacgcattgcaatttggatagaatttgccagatagtctgagattattttttatttaccaaatacactggttgaaatgtaatgagggcctgttgcacctctgtgatttggtctgtgtgcagccccctgccagtgatgttcactcacacagcctgtcactttgtaactgggaggccgtgagcccaggtgacagatgctgcaggtatacccagctctccccagctctaacgactcctcctctggtcagcaggttgatgggagtgcctcagtggggagggagttcatagcaaccactccctccatcaccacggagaccatatcgaccaccatggtaagttgaacccaggaggcttccctctctgaccagccccctgccccaccaaacagccagagaacaagctaacatcgcctggctgcttcaggaagttgtgagctgccctcgctgcatcaggcatgggacataagtcagctgtttattatctggggctttagttgccacaggacatagtcaggcctcagttttccaaagtgagtaatgtgggcgatggaatccccactgatagtgtcagttatctaggccatctcagccacagcagagagagagagaggatggtcttctttggttattggcacccacgaatctcatcttgcattgagatttcattggctcatctcacctccactctgaaggtgaggctggacccatcctggtggctgcacattgtctcatgccttagaccacttccttgccttggtcagtagatggcgtgtggtgaccctaagttggaaccaggatttttgggacctccctattgagggacctcatggttctgctacttatttgctgtctgacccatgaaggaaggcccttggcctgaggtgtcctcatctgcaaaatggcaataatccccattctgcagttcttaagagaccccggcaacactagatcccttcatgattaaacagaacagatagcatttggcacacaggttgtggttccagtcaatgtgctgagactcctgagtggataatctccgtggatgctcacagacactgtgaggtggatgctcttccctccacaacctttatagatgaggtaactgaagttcagagaggtaaagcgacttacccaaggtcacacaatcaataagtggtagtgccaggttatccccaggccttctgacaccaggagccccactttcaaccccagccactctgctctgcttccttaatcctgaccattgtgaacatcagccgcatggggctggggctgcggttgcagccactactcgggctagggaaggtagcagtgctggagccagagaagttgttttcaaatactgtttcttgccaacctcctgacatacacataggaaggtaattccatcaatctagactagccagcaggtaggttttgaatacacagaaattttaaaatcaataagtccaaactagttaccagcttgcacacctttccctggtcactcagttcctcctctcccctcagtccttcaccacgtgtcattgggatgcttgtagggctaaatttaaatccgttcatatggtgagcaggcacttataccattcatttactcatccatccatccatctattcattcatttgttccaaaaacatttattagtctgtactatctgcctggtatgggggatacagttgaagaaactatactgcctgctggaattcattcattcaaatgaccatcatgagcacctttaatgtgctgtgaccctgtatttaggttctgggcatacagcggagaacaaggcccagctgtcccacttcctggctggatgaccttgggcaagtcacccgaacctctccaaacctcagttttcacttctgtaaaatgggtgagggtagagggcagtaatagcatgacctcaaagggctgatgtgagggggaacgaaagcaatctgtgcaaagccctgagaacagtgcctggcgcataataagtggcctgaagatgtgagctgcagttacttctttcctgccttcatgggacagtgtaataatgctatcctaggggccaccaggaggacagctatggggtgacagctctgccaggaggagccaggaaaggctttccctaggcagggacatttgagtgagctatgcttgaaggataaattaaagtatggtcctgggggaaggcattctagacagtgggaaaagcaagtgcaaagggcagaagggaaggagtgcagcatttggggaaggaccagtggtcaagaaagccagatgtcaagcacacggaggaggagtcgggggggaagagctggaaaggaaggctaggccagagcttgatagacctcaaatgtcatataccaagttcaaacttctgtcctgcagacaatggggaatcacttaaattttttacattagggacatgatgtcatcagatatgtgtttctgtgttttagaaagattattctagcaacctctgtggaggagggacttgagcaaaaaattcttccctccttctctctctctccttccttccacaaatattgattgaacacccatgatgtgtatagttctgtaccagccactgtgaatccagcttgaagaagggaacatcccggggctctagggcccacatgccactgggagagacagagagagaaggcagggaaccagcttagatgctggtgcccaggctggggtggggctggagtgcaaggaggtggatgcagagaaggggtcagggttaagggatgcctggaggggggaaagcacaggatttggtcgttggtaggatgttcaggggacaagaggaaagatgagctcgtgacaccgttcactagccaatggttctcaaaatgtggttccaggaacctgttagcaaggcaggtcctttgggctcctccttagacctattgactcggaaactctagggtggggcccagcagtgtgtgtttttccaagccctccagctgatgcctctgaagttggagaactgctgatgtaaacagagtgatgggggaaagtgctctttagtgacaagcgtgtgttggaagtggaagaagcagtgaattcctttcgagatcggatgagtctgaggtgcctgtggaacatttccagggcaaaatgtctaggacacaactggttttaaaggcctagggtccaataaatatctgggctataggtgaagggataggggactttgacctccatgaggcagcagaagctgttgagtagccgaggtggcccagagagcgggtggcaagtgaggagagcctgaatgtggaggaagagagggctgagtttgccttggtcagggagaggaaccactcctcctggaggcaggtgacgggactggccaaggatacaggagaggaagggaggagcagagggtgcctcgttttgaatgactgatgtccctagtggtggcctctgtttttagtgtgaaggtggaggtgaggctttgccctgggaaagacagaacaatgagagaataagaggctttaagggagaacttcccagaatgatgctaggattcataggggttagtggctgttaaggggaaaggaagcattgagcccggaagctgcccttgggaagcctgctgctgggccacattctggaactgcaggtgcatctgggaacgtgccttgtggtgcagtaccaaggaaccaggctgctggcagcctcagcaggatgcaggtgtgggagcggcaggggaaagtcagcgagtttcttttctcacctgtcccttggtaggcagaagtccagatctagtgccatgcctggaccagaatcagaggtcaggccactgaggacctgcagaatggacacagttctgggcccctggacagacaaggctgagccctgagatggtgcagaaagtaggaggtagaagcaggcagctgggccctggcgccagatcgggggcagtaagtcaggggacaattccaggaagatctagcaattagaatttaaggtagggccaagagagctgtctgaagggaaagattcccaagggcagagtggcgtgcacagtgtgttggacttggagtcagacaacatggagttaagttccagctctaccactaacttgctgggagactgaactcttaagtttctcttgccctccagtttctcatctgtaaatcaggaatattaaaaataatgcccaactggtgttatgagaattaaacgagatgaggcatgtaacatccttaaaatgatgcctcgcacatagcaagcactcagaaagtcattattattattatattctaaatagccagcttatgcccctatatttatcctatgtattttggtttgcaaaaccttttctactccattagcttcataggttctgtgtgggattggggcaagggtccttttttacagatgaatctgtgaggcccatagagaggaagtggctctgccccaagtcacatggcttgaaggtggcagggcaggacacgagcctgaatctggcaactcctctgctagtgcttccggagaacaatgccatgtcttgatcactacagtgttcctaacgccagacagtctgtaaatgtttgttgaatgagcgagtgtgcaagtgtgcgagtgaacaaatgtgtgcctgagtgagcaagggatgaatgaggcggaactgaacgatgccttcagtcctttgcttctattatttctactcaaccttgtggtcgtgatagctacatggccacatgctccgcccatcctgggggcccacccggctgagagctggccatctgagcactattgtttccccaggagaacagtctcaagtccgggaagggggcagctgccatgatcccaggcccacagacggtggccacggaaatccgttctctttctccggtaagtgggcaaggccagctcaggctaggggactccacactgagaatatgggcatggacccatgtatggctggcaggaagtgcagcgttgagcccagaaggcacccttctaggtgcaaagccaggaaactggacccttttcagatgcccacagggctccctggtgcctgctagaatctcatgagtggccctccccaccgcccacacatgtaagtggggcattggtgacatgtgagggtaaagcggcccctcaccttggtggtgctgctgagggttcttttgcatctgccctccctactaaccaggaagagcaatggactaggaggccagaggcttggattctggacctgcctctgttggtgcctgcccagtgaccctgagtctgtcactgtagggtctctttcagctcttgcattctccaagtctgtggttctcattgtttagctccgcagagagcgtgcacctggctatgacaggatggggcatcaggagggctgtgtttccaccttggatccttttggtcattcttccatgatgccaggattcttaaattctagggtattgttaggattctgggcctcaggaatcttagcgtctaggaatctcagactccaggatttgagaatttgatgggtctagttttctgaagattctagtattcttgaattcttaatggctgaaagcatcttggcttcgaaacgtcaccttcacagagccctttaccccaccccgccctcacccctccagagcccactgtccttacctgacaccctgggtggggggtggttatattctgcagatcatcgggaaagatgtcctcaccagcacctacggcgccactgcggaaaccctctcaacctccaccaccacccatgtcaccaaagtgagtagcagcagggcgccccatgcccccagccgagctgcaggcgagaaggtcatgactgttgttctgcttcggcttcgccatctgtaaagtggacagagaaaacctgtagtgtttaccagcttctggaatactgtgcgctttgtcctgtgccacatgttgttctaggcacgggcccttcccacacggcgttgacagccaggctagggggaacaatactctcctctttgaagtaactgtgaaccatggcgtgtgcgccttgtagatggaaagtgctggaggaatctagacggggtgacatatgggaggccctgcaagagtcaggaagcatctcctggaagaagtagggactgagtagagtcttggaaagccaggcaggacacctgagggaggagaagacagatgcgggtgttctaagcaaagcagaagagggaagcagaaattgtgtgtttgcttatttgtttgttcactgagcagatgttagtgagtgtcaactttgtgttagcctctgtgccagggctgctggatgtagcagtaagtgaggcctgtttatgggacatgagaagcacatgtagggggtgtaactgggaaattaggttgcactgggggcagggaggtggaatatagagcaaataacaaataccaggacacatttgactctggaggatctgggcctcagggagattggaaagccatgaaggtttttagattggagagtaacccagtgaacataggtttaaggagagaatatcaggtccaccaggatgtgtagataggtgggagaaagaagagggagaagtatggagagagacggataataaataactcaggcctggtggggagggcctggaccagggtgtgagttagagctcaggcagcaagaggtaggggcaaaggagggaagccttcctgggtgacccagcaataaggacaagggctagttgggaggcaggcgggctgatgcgtccacacctatgtggccaggaggaaggcaggagggcgcctagccagggctggaggcctggagcagccaggttgatgagccatcagaggagaactctggtcagttgcactgggccttcatgcacggactgtcctggcctctgcctgcgcctctacaggattcagcactttctcacgtaccccacaaagaacccactctcagcaaaagcattactgagcaatgttgacttctctgaaagctttatgggaggttttacatcccacgcccacagcagacagctcaggaaactcttcttcccaaagtccctgccaactgggagccccctcttctttctatccactcctgactccagctgggattccccacagacaccaccctgctttaacatgccaaacaattaggtcctgcctcagttattacttctaaacttgtccaaaccccttgccttcagaaaacagcggaggtcataagtatcatcaatccaattttctcttgtagtattttttgaagttgcttaaggcagaaccttgtcaccattcacatttcattcatgtgttcattcaacaaatctgcattcagcactgccctggttagactgggtgagggagtgggggaggaggggatatagagatgaacaaaatacagaccctgccttcaagagctggcagcctggtgaggtgaacaaggccacagacatacataaggtcggcaccaggcagagaggtccagaactgtgagagagacagattcagtgctcaggcagtaccaaggcaggaagacagaagcattgccaaccagggtctgagaggcagcattggagctaggcttggaagacctagatgggatagtttggtagttttggggagtggtggcaaccaggcaagatctgcagttcaaagtccaaaatcagaaaagaaaaaatctgaggaagtcaggagagaaggtaactgctggttctcagccctgccctcgagagatgatttgggtaggtcccctcttgaggctgctgccccaacaggacccaagagtgacctcacctccctctccctctgcagactgtgaaaggagggttttctgagacaaggatcgagaagcgaatcatcattactggggatgaagatgtcgatcaagaccaggtatgggggtagcaaccgttcttcccagtgccactgcccagtcctcaatccctcctatgttgggttacccatggatggctatcctcatgggcagagaaggtgtccacttcttgctgaccctgttcagataagaaacccccaagagaggggcattggatgggagccagaaggagccagaagacctgagctctagtctctccctttagttgtttgactttgcccctctctgggcctcagtttttccagctgtgcactagagggcttgctgttcttcacagtctctctcgtcttggatagttcatggttccttcctttgctgttctttaccaccaggccctggctttggccatcaaggaggccaaactgcagcatcctgatatgctggtaaccaaagctgtcgtatacagagaaacagacccatccccagaggagagggacaagaagccacaggtaaggctcctgaggcccagcaaccatgagagagaggagggagcagtagcaagatcctctgagggccatttccatctgagaagccagtggcttgacccctagtgcagctttgaccctccccccatcagccttcctgatttgctgctcaaaggagagaggcacctccccgagatacaagtcggtggggagaagaaggaagactggttccttggtttctttggggtttcaggctccagatccagaaaaataaatccagaagtggttaaaaatttttttaaagggagggaaatggagagaggattgacagtggatattgaggtgggacagatggaggtcctcattatctccttgggcattgtctataaaccggaagtcagaaaaagtcctactaggcccagtgccacgttcctggccctgagtctctctctctatcacaagtcactgaatgttgttaaggggccatgatgaccagagcccttgatcccttttgtcttgcttgattgcaatttttatattttttgagatggagtcttgctctgtcacccaggctggagtgcagtggtacaatcttgactcactgcaacctctggctcctgggtttaagtgattctcttgcctcagcctcccgagcagctgggaccacaggcgcccgccactgcgcccagctaatattttgtatttttagtaaagacgtggtttcaccgtgttagccaggatagtctcgatcccctgacctcgggtgatctgcccgccttggcctcccaaagtgctgggattacaggcgtgagccaccgcacccagcctaatttttatattttcagtagagacggggttttaccttgttggccaggctggtatcaaactcctgtcctcaagtgatctgcctgcctcagcctcccaaagtgctgggattacaggcatgagccaccatgcctggcatgattgcattttgacttctgagacctgcaggagccaaaatcttagggactctaatattctcttgtttcactgtgggccatcaatgctttggtgaataagagaaataagatgatgttggggcagatagggcttttaagcaacctaaattaggggaggggttcttctgggccctctggaaatttaccagatcttatcagatcttaaagcaaaatcccatagacattgagttggataaaataagccaggcacagaaagtataaactgtatgattccattcgtagggagtccaaaagcaagcaaaactaatcgacaaggttgaaaatcagaatattcctgattttctatctgagaaaaaaattcttctgatttttctgttacttctgggatgcagtattcacaaggaagagggaagggccagaaaggaaccttctagggtactggaaatgtcactattttcaactgggtgggttacatgggtatatacatataaacacatttataaaattattctcccacttagagttgtgtacttcacacatttcatgggctctaccacaatgaaaaaaaatccatctcaaagaccccacaaatataattgctggtctcctttttgcccttttccttgaatgaatgaaaccagtcttttctagaaagatacgagaatgtttctcttcctttgattaccagaccccttaatgtcagaagaaaaagcactgaaacattttcctgctgctctgaaaggctgctaacctctggtctggactagggctgttcagcagaactttctgcagtgatggaagtgttctttctgtgctgtctgggatggtagtcactagccgcatgtggctattgaggacttgaaattggctagtctaaaaagaaatgtgctttaagggtgaaatacatgcaggattttgaaaatttaatataaaaaaagtaaataatctcaataatttttacattggttacatatttaaatgataagggatacatcaggttaggtaaaatgtactattaaaattaacttcatctggccaggcacggtggcttatgcctgtaatctcagcactttaggaggccaaagcaagtggatcacctgaggtcaggagtttgagatcagcctgaccaacgtggtgaaaccctgtctctactaaaatacaaaattaggagtgggggttggtgggtgcctgtagtcccagctactagggaggctgaggcaggagatttgccttaacctaggaggcggaggttgcagtgagctgagatggcactattgcacttcagcctgggcaacagagcgagactccgtctcaaaaataaaataaaattaaattaatttcacctgtttctttttaaactttttaatggaaactaaaattgagaaatttaattgtgaaattaaaattttctatttatctagaaatttttagaaaaatagaaatatatagaaaatttaggaagtgttatctagaaaatctattatctaggaaaaaaatttttttttttgagacggagtctcactctgtcacccaggctggagtgcagtggcacgatcttggcttactccagcctccacctcccggattcaagtgattctcgtgcctcagcctcccaagtagctgagactacaggcgtgtgctaccacacccaactaatttttgtatttttagtagagacggggtttcaccatatttgccatgctggcctcaaactcctgacctcaagtgatctgcccgactcggcctcccaaagtgctaggattacaggtgtgagccactgcacctggacctatctaggaaaattttaaattgcatatgtagttcacattctatttctattggacagcactggtctagaagtgtaggttggccatgggcggagcctacctcccaggcttcctcagaccttcatacaagtgattgtcattcctatcccctcagtttttcaatcattcttcctttattcctcccaaatctcagagtggtagagtgtaggccacttgctgagctgggtgtatcacctggggaagcctgtttaaaatacaggcactggagaaccctctccataaagtctgatttagaaagactggactgggacctgggacctgtattgcctgggaatcttcatttctgccttggtccttagggagtccgcgtgcagccaggtatagtagcattgatgcaaagaactctgtattgggaatccagggacctggctctaaagctgttccactgactggtgtgtgaccgtaggtccgtttcttcccgcttgaggactcggtttcctcacttgcaaaatgaagaggtggagcgagcccccttccaattacagtcctctggctatttgctttcctggggtatctgttgtgcttttctcatctcttctccattccctctctcacgcctcctcatctttcccagggcattcagaaccaggcccccaggctcccgccttcccatttccctagccattcagagccctcatcctggcctccacatcctgcccaccccgccgcgatgcagtctttcacatctgcccacctcactgctccctttgctgtctcattccctcctcctcgcctctctttagttctttctttgctgccattgccccacgcaccaccatgccccatctctctctcttctgggttgttctgtaaaggtcaccttgtttatgttgccctggcaagccagaagtttctctcccttgccttttctgcccacatgctttaccagtaattatggtcaagtagaacccaagtctgactcttaatacagtcagactcactaattctagaagaggtctcctctgaattcaaaaactcctttttaaagtgcttggaaacattggcttaatggatggatgcctcttggtaccccaaggaagagctctgtactcctgcagagtctcaagccctgccctttattagctgtgtgaccttttagcaaatcatttaaacttttcagcctatgattcctcgtcagccaaatggcaatgatcatcacagtaataacaatcgctataatttatggaaagcttaccctgtgccaggcaccaggctgtgcactcaacacaagtactgttacctgctcattcattttacaaatgaggaaactgagggtcagagatgttaagtggcttgctcacagtcatgaagctgtgaacatgatggattgattagagagtgaaacccaatctgttagactccaaaacccaatggtcttgaccttttcaccacacccacttttcataacgtctgtctcctagggctaccaagatcatccatgcagcatggtagttagcacactgcctaccacatcgcgagtgcttaataaaagctcattatgactactattaccattaacttgaaataggctaacaaaatgctgcacgcagggactgtgctgtgctgtaataaaccaagaagaataaatcataacactgtattgtttagatgtctttggtacttctgaagtgtctatgggcttacgaagacatcccacatacccagaataatgattacactgacttataggacagccacttcattaattgatgcacaaacttaaagtgcagcctgttactgtaaggaaaaaccaaaccaaaccaaaccaaaaccaatgcccagttaggatgtagtaattttgctactgagtaatattctttgagtagtattctttctactcaattttgaccaggggccaggcacagtggctcacacttgtaatcccagcactttgggaggctgaagcaggaggattacttgagcccaggggttcaagaccagcctggccatcataatgagaccttcgtttctataaaaaatgtaaaagattaactgggtgtggtggctggcacctgtagtcccagctacttgggaagttgaagcgggaggattgcttgagtccaggaggtccaggctgcaatgagctatgatcgcgccactgcactccagcctggcaatagagcaagaccctgtaaaaaacaaaaaacaaaaaacgaaacgaaggaaggaaggaatagatggatacaactaggttttggagctagaaacaccttggtagctgtgtgcccagaggaacctctctgacctcagtttcctcatctgcaaaatgtcattaatgtatacattggagttgctgtaataactaaacaacacctgtgatatactggatctgtgtcttgcctacagaaggggctcagcaaggtgaacctgcttccttgtccctctgaggtttttccatgtttagaggttgatgagagtactgagaaagtcagatcgtaattctccaccaccagcctggtgcctgaggccctgtctccatgagggtgtttgtcttactggtcttcatcttctgttccttctgcaaatcctccagaaacatctgtccctgcttcagttaactctgtcttccttcttaaagttcttccttcttgaagttcttgctatgagcgtggaaagtcactcatgtcacacagaaccttttcccttctctccctgcaaccttgcaggtcagacgtctggtttctgctccatcttctcccactggcccacctccttcagagaggacctgtctcccaaacaccaccagcaagagggcagcacttgcctagcttcctaaccttccaaaatttaatgggaaaaaattgacctgttccaaaacaggaaccttgggttttagtcttggttttgccaacttactaagcctgaagcctctgggcctcggttttcctatgtgtcaaatgagccaagaaagatccattttctgtgattccgttagcactcgactgcatgcaagtagcagaaatgatgtttcatccattaaatggttttgagtagttgctatgtgccaggcacagtgttgaacactggaaagacaagagttaaaagatagcccttaccctcaaggagatcagagtagtgtgtggttaaattaacaacagcaacaatcatcataataagaacagccagtatttattcagcacttactatatgctgggcccttgcttcagttcctccctataatgggaggcagaacctattttacggaggaagcaattgaggcttaaagaagttaagaaacttgccaggcactgtggcgtgcacctgtaatcccagctacttgggaggctgaggcagaaggatcacttgcagccaggaattcaaggctgtaatgtgcattgattgtgcctgtgaatagctattgcactccagcctgagcaacatagtaagactcgtctgttaaaaactgtttaaagtaaaggaagttaagaaactcacccaagattacagagctagcaggcccatagagtgggatttgaactcagggagtctgatttcagagcctgctcctttaaacactgagttttggagccaaacctggaatccagacttcatttctttatttaaacactgctgtctgtggtttaatctccaggacacagcaagcccacggacaacagaaaggaaaaccaaatgaaaaaagaacatctgcaatcgtgactaaacatttcttagagctgacaagataggaagaaaaagtaaaatgatgatgatcttagcttctcggtgttaaaggacattttaacacattgtcaggccaaagtaaaagattaccacctccctggaaacaagcgagcaaacacacatgggctctggaatccaacagatgtgggttcggttctctgctgccacacacaagctgcgtggccttggagtgcaatagctactcacaggcatgatgattacacattacagccttgagtttctcacctcaagagatccttccacctcagcctcccaagtagctgggattacaggtgcaagtcactctaccttgctgagtcacaataaagggcatatggtaaagggtagcaaaaacaacctcttgccatgtattttaaaacaagtgacagaagttactaatttttcttgtcctcttccttcctttccccccactccccaccccccattctaccccatgcctctggcttccaggaatcctgacctctgtgaagagatcctggcatttctggtccaacccaagccagagaaccattaagaaggggccttcattctggattctccgacgcaacactgacgtcccagctgcgacgtactgtcactgatgagagactgggaagggaaaagcatatatatatagatatatagagatatagatatatatacaggaaacaccgcatccttgcactgctgctggggctggcagagcagttggctgacagcaacaaccgacatctgaacacctacatttcctttgcagacaaattgaagaactggtgggatttttttcaagaaaaaaaattatataataactataatcccttgctcacccctttcccccgccaaataagaaacgcaagccagaccacgatgattgtagaagtccctcccgccctggttctgcacgttacagttagcagacgagcaattccatttgttcttctccagcatctctaaggcccacttgaatgcaaaggaaaacacttgcacagcaaagcaagagaagtcacagcagcaagacacgcacagtcaaccattttccgagaaaaaaagaaaattccccacttggaaagaaagaggaggaacactggattcttactttctggatcttgacactgggctgcaaaacctaccttcctctctcccgcctcccctcaccctcaactctcaatgtcttgctgtcattttctgtctcggctccctcctcccccttcccccttcccccaccccacacccttcaccctctgtgtcctggtccttctgagggccactgcagatgactctcctttgaaatgagaaaaagaaaagaaagcaagaacagaaaacgaagccacaggaagggaagtagacattgtatgcttatggtttctcattatgaaggtgcagcttgtaggaggtttgtacggatgtgctttgaagttatgtatattacatataacaggaaaaaatattaaaataaacagtgctggtaagtatgaagctgacattctaaaattataattatctgactgtgattgatgtatcctgaggttcctagatctcactgaactggcccagctaaggagacctggactctgggtgtgggttggctcacagtaggggctgacgggttcagtgtagtaatactgtgtgtggtgtttgtaattggttgattggtggggaggggtggggggccctaatggagaggtgtgggtttggcaagaaagaagcaacacagatgtcgtccccaaaatgccagttcaagacaccttctccctgcccccctggtagtaacagtcagggcctggtctgtgctcaggtactgggtcccagtctgggactctgctgctgaagttgccacagtagaggtccctggcttagtccttatctccctacggggcttgccttggttttcagtcttctctctctttctctcttttttttttttttgccacattctgcccttccctgaccccattgtaataaccaactccatatccaaagggaggtggtgctctcagccattgtagaagatggtggctttaacctgactgtctaaaaattcccagctaagccttttcctctactctcttccttgttctgaatcatttcttcttctcaggccaaagtagccatggtaaggaggcttcatggggcagaccctgaaagatcaaaactgcatttgcaaagccctcccctgtcccaggacaaagctgagactgacgggtgatgttgctcataggctccagctctgcataagaccttggcttggagacctccctctcagtcaacagctgaactctgagcttgtgcccagaaattaccccaagaccacaggaacccttcaagaagctcccatcacaagcttggcattgctctctgccacacgtgggcttcctcaggcttgtctgccacaagctacttctctgagctcagaaagtgccccttgatgagggaaaatgtcccactgcactgcgaatttctcagttccattttacctcccagtcctccttctaaaccagttaataaattcattccacaagtatttactgattacctgcttgtgccagggactattctcaggctgaagaaggtgggaggggagggcggaacctgaggagccacctgagccagctttatatttcaaccatggctggcccatctgagagcatctccccactctcgccaacctatcggggcatagcccagggatgcccccaggcggcccaggttagatgcgtccctttggcttgtcagtgatgacatacaccttagctgcttagctggtgctggcctgaggcagggcaggaaatcagaatagcatttgcttctctgggcaaatgggaagttcagcggggcagcagaatcagtggcattccccctggtgcaggccggtgggtccactccaactccccctgagtgtagcagcacactttccatacaccaggttctttctacaatcctggtggaaaagccacagaaccttcttcctgcccttcttgagagttccccctctttctgggtcaagagctggagtggtggctccatcctctctgggccacttcggtctaggaactcatctttgcaggaaccaggagtcctgagcacactgaacacacctcagagggaggatccttgttgtggattttgcacctggctttggggcaggggtgaagtgaccaggcttagcttgtggagtttatgggccaccagggtttggggaaatcaccatcccgcggatgctgtgacctcccttctacggagatgcaggcagtgccacgagggaggaggggacctgcaaagctagaatctagggcactgtttcctccccatccttctctttgtagagaatagagacgtttgtcttgtctgtcttcaacctacttttccttttctcttttttgtttctcatcctctctgtgccacctctccacccaggaggccatgtagcatagtggaaaaagtccctgagggcggttaggagttctgggtgaccatcctggctcagctcctaactcaccatgtgacatcaggctatccccattccccctcttgggcctcagtttcccgacttgcaaaataagcagaaagaaccagatgctctccagggtctttttctactttgctatctcatgggtcttcattttctcttattttgttttctctggatcttttccatctgagggtacaggaagtaccaggacctgtttcagtttttgaatcctgcaagcacattccaagactggcctgaaactgcatgagcaacatcactcgaaataattttttttttcaaaagcaccttaacaaccaattgcgatgctgtcctgttcctttttactcacacccttctctcctttctcgtccccatgctcccccacctcagtgctccgtgctgtatgcgtgtgctctctgttcttgtatactcaatataagtgaaataaatgtgtttgatgctgaaccatacttccttggcacctctcctctctctctctctctctctctctctctctctctctctcactgtctctctctgactttggccactggtacaagttggcactgtgggaggggctaaaactgaagtggagacatcccaacttagaacatgtttatgcaacaaatatttggaactcaaggtggtccaggccttgggtgactctccaggcacaacacaaacaagacaaaagtccctgcccttcatgaacccacaggctagtggaggaaacagatgccaacacaggcaaacagtccgttacagagcactcagcactaggaaggaaatacaccgggagaagggaaggagggtcactgaaggagaccactttaaatacagtggccaggtaaggcctccctgaggaggcgatctgtgagctgaatgaaaagaaggatcaatcaacaaaggcgaggaactttggtgcacattctaggagagggaacagtaagcatacaggccccaggacgtggaggggcttattgagcggagaaacagcatggtccctcctcctgaaagaagagtacctacattggagtctctcttcctgtaacccccctacatgggagcctagtgggaaaaaatacagcaatcctcaacttcggcctttgcccagaacctctatatatgttcccatatcctcataccacctgtcccattattcacttatttttctttaaattgactcaggtcaagtgcagtggctcacgcctgtaatcccagcactttgagaggctgaggcaggcagattacctgaggtcaggagttcaagaccagcctggcccacatagtgaaatcccatctctactaaaaatacaaaaaattagccgggtgtggtggtgcacacctgtaatcccagctactcgggaggctgaggcgggagaatcgcttgaacccaggaggcggaggttgcagtgagccgagatcgtgctactgcactccagcctgggtgacagagagagactccgtctcaaaaaaataataaaataaaataactaactaaataaattgactcacgttaaaagcaaatgcatttaaaaaggaaactatattacttccacaaatgaaaagcttatgttatttgccaagaaaggaggtcttcataaaataaatgcaaaaatattaaaattaacaaccacaatgcacttaaaacctaaactcatcccttggaccacctgaggtgcacacaccacactttccttttattccaccaagcaactcacctcagcccacctttattgctgcaaatctcaccagcgagtcttttccatgtgtatgtatttttccagagttggtcatcttgtacatacttttgtaaatactttaaaatatatatatgtacatatatgtatatatatgtacatatatatctatatacacgtatatatatcctgagcatttccgtatactttcaaatactaaatacttattttctttggaaaggtaattcattaaatgatacaaagactatgcagtgaaaagtgattcttcagccttctccagatttctgtctcttgtcagaggcaattgctgcgaggaacattatgaatccttctctgaattttccctataggtctcctttagcaatctgttatccctagggttctggaataggacttggtttacaaacaatgggtcttcatatgattcctcaggaccccatacaccctgatccatatttctgtctcccataaaggaccatcctgactcggcttttgtcgaataatcaaaggtaagttcacccagattagtgtttttcaactgcattgagagtggggaaatgacccctcctcctttacccccaacccccgccccggggacatttagcaatggttgtcacaactgaggggtgctactagctctagtgggtagacgccagggttgctgctaaacatcctacaatgcacaggacagccacatacaacaaatacttatctggccccaaatgtcaatagtgccaaggttgagaaattctgatctaaatggacatgtgacccacaaggtgggactcctaggccaccatttacagcttctacaaccagtgttcagtgtcctggagtctctgaaaagacggtgagcccaactgaaacagggagctttgagaccagaccatagagctcagcacttaagactgggagtggggaggggtggagagggagctgagcttcttcatgcaggagatgaaacttgacaggacaggctgagattggtaagcatgactgtgactgatggaggctgtctctggttaatcctgcagcagctcattgtgattaaccatgactgcagggcccggtctagtctgcaacccactaagagataaattttgaccgagacagattggcgtgtccagctgtcactgaggaaatgtgacagacaagctaaggagcagcagcacaagagataagaacagacagcccttggtttgcattctagctctgccattctctggctgtgtaacatctctttgaacctcagttttctcttctgcaaattgggaatacacataccttacaagggttagtgcaaggattataaatacccaagtgggccgggcacggtggctcatgcctgtaatcccagcactttgagaggccaaggtgggcagatcacctgaggtcaggagttcgaaaccagcctggccaacaagatgaaaccccgtctctactaaaaatacaaaaattagccaggcacggtggtgggcgcctgtaatcccagctacttgggaggctgaggcaggagaatggcttgaacccaggaggtggaggttgcagtgagccgagatagcgccattgcactccagcctgggtgacagagtgagattgcgtctcaaaaaaagaaatacccaagtggcctgccctaaaatcacataagccaattcttggcaataaatcacttaatatagatctcctactggctctgtatctttggtggaaccctgattaatagtgcagggttagacccacaaatagttatttattaataccaaattatcatcattattaattaaatgcataatatatgtactcagctgagcttttgtgcctggctttgtgctcggttccagggaaacagtgaggaacaagacaggcagattccttccctagtgcgttgatagcctgactgagatgttaggacttggcctgcaggaaggacacggggtgataatggccagagggactgaggtggcgaccgctgctgctgcagcagcggaggctgacgctggttctctctgggctggtggctgggtttctgaggctctccccgagggctgagtgtgactggaagctgagacactgtgaccgggatagagactggctgacaaagacagtgaccgagcgcctgactggctacttctgaatagtagccactggtacaagccttggctgtgctttagtgaccatgactgcttgagcccaaagtaagatggctggtggctgtgtttctggacggggatataaaatgcataggttaatgaaagttgttcacaattcagaagctaaaacgagaaactaagaataacaaaaggcaaccttgcatccggcggaacctgcaggcacgggccattcttcccgcgacccagggctctgccggaccgcttcccccgtcgctccagtcagacgccaaagctggagaacttccggtgcgtttccgctgtaccggaacgtggggcgaggcggtgagtgtggcctcctggcctctttttcctttcctgattccttgtgtatgtgtggctgggccgcccctcttctcggctcagagtcacggagtgccttgaactaggcccacctcgccggggcggctggttctctgtttgtgggacgctggtgtctctggaggcccttcctgagaagccgtcgccagagttacgtcgcggttttcttaactttagagcctgggggccggagaccctgattgcactcgacctggctctgccctactctctgcgtgacttccagtaaggtctttccccgaactgaggctttgtttctcgtttacaaaatggatatcatacttgtattaaataaatgtttactaagcgttgaatctgtgctagggatacagcaggactcaagtctcgtggcgatgacagccttcaatcaaacatccaaaactgcagttgtgatcattgagacggaaaggtacaaggcaccccagattatatcacaggagacctgacctagccccagggcaaggaacctttactgaggaggtgaatattgagctgagatcagaaaaaaggatttgacaaagtggggagggaagagttttctatatggagacagcctccaatttcaggttctgaaagaggccgttgtggctggaacagagagcttgtgggggaccattgtgtgacacaagctaaaggggttgccaggagtcagaccgtgcaggctttgtaggtaataggaagaattctggtttttcaagaaccatatgggaaaccactcagaagctgacatgggtggtgttgtgattagattggcattttgaaaaggttactgctgttgaatggagaatgggttgaggagcaagcactctgagtgagggacgatggtagcttggattagggaggtggtggagagaagtggatggatgtgactttaggtgttccaggactgtgaggaactcacagagctgtcagtgacaggggctggtagactgcagagttctatgcatatttaataaacgttttcctagcatctcctctgtgctaggccctgtgccagctgctggagatatagtgaatagaattacagactggtggaattagcatgaaagaaacgtcattatcaaggaggagcacacagatgtcacaagggaaaatggctaattgatgagctgttattgtaaatggaatatctgttcattcagcaaatattaaatactttctgaattcaggattacaaataggaagatgatacgtattattattattattattattattattattattattattattattattttgagacggaattcgctcagacccccaggctggagtgcagtggtgtgatctcagctcactgcaacctctgcctcccaggttcaagcaattcttctgcctcagcttctcaagtagctgggactactggcgcacaccaccatgcgcggctaattttttttgtatttttagtagagatggggtttcacagtattggccaggctggtctcaaactcctgacctcattatccatccgcctcggcctcccaaagtgctgtgattacaggcgtgagccaccacgcccggcctgttgatacgaattatttagagcagagtctttcaaacttttatgactgtgacctacagtaacgaatacattttatggcacaaccaagtatacacacaaacacacaaagctccagaaaacagtacttagctttactactcatgatgtattgtgatatttcaaaaattctgttattttcgtttaaaaaataatgctggttgagaccttcacattgatttcctaatccactaatggattgtgacttgcagtttggtgaaacacaaagtgctgattcagggtaagagtcatttgtggtggttttgaggtaacaatgataaaatgtgctcttatttttggaaaaggattggtcttcctttctgcactgctttatttaaagtaaaaagggtaaacagggccaggcatggtggctcacacctgttatctcagcactttgggaggccgaggcgggcagatcactgaggtcaggagttccagactagcctaggccacatggtgagaccctctctgtactaaaaatacaaaacttagccaggtgtggtggcacacaccggtagtctcagctgcttgggaggctgaggcacaagaattgcttgaacccgggaggtggacgatgtagtgagccgagatcacgccactgcactccagctggggtgacagagcgagaccctgtctcaaaaaaaaaaaaaaaaaaagtaaacaattaaacaggcagctcgtttttctgtgtgtgaaattttgacgtcttggctagattggaattgcctagagggcagtgactgtcttaatctgtgatgttttttgggggcctggcaaagatcctggcacaatgcaggcactcagtgagtatttgttaaattagtcaggtaggtatcttaggactagaaggttgcataatggtttgtttacatttgttcatgttggtaccattcttgccgatatcccagaggcaatgtctgggatattcagaagtaggtaaaataagtgtactaagctctttctcttctggccagctttctcttcctaggctagctttaccacctgaattcattctggatgaatggtccagagccaccactgattgtgggctctttgggaagttgtttcactccctggagtttaggttttttatgagtgaaagaagaggggagatttgtggtaggaaagctctctagaccctgaacaaactttagatgctgagcctccacttgctaccgtctgtccatttctgggccttccctgaggcttatgggaaactggatatgtacttgatttaatctttccaaatcttttgggatagttttttggcagaattgtagttttaaatgatgtaggcatatagtttagagtgacctgtccaggcattttccaccctcaccctctgttgtgagaaagagatctgagaagatattaagaatggacggtggacagaacactggcctgcaggcagggtatccagattctaatttgggtcctggtatgaccatgagcatgtcacttttctttcactggtatcttatagctgtgaagtgagtgtccttgcatgttaagccaaaacacaaaaatcctttcctttaatcctcgtttttctcatctgtaaactcaatgcagggttgtcatgaggattaagggaaataattatgtcaggggtctaactcaatatctggcacatacagaatgcttagcaaatgaagcatctttcccccacgttctgattaactctggtttctttctttctcagctgttcatcaaagaaaaagggttcttttggtcacccaccactggccccatggctgccgtgcagatggatcctgagctagccaagcgcctcttctttgaaggggccactgtggtcatcctgaacatgcccaagggaacagagtttgggattgactataactcctgggaggtcgggcccaagttccggggcgtgaagatgatccctccaggcatccacttcctccactacagctctgtggacaaggctaatccgaaggaagtaggccctcgtatgggtttcttccttagcctgcaccagcgggggctgacagtgctgcgctggagcacactcagggaagaggtagacctgtccccagccccagagtctgaggtggaggccatgagggccaacctccaggagctggaccagttcctggggccttacccatatgccaccctgaagaagtggatctcactcaccaacttcatcagcgaagccacagtggagaagctacagcccgagaatcgacagatctgtgccttttccgatgtgctacctgtgctctccatgaagcacaccaaggaccgcgtggggcagaatctaccccgctgtggcattgagtgcaaaagctaccaagagggcctggcccggctaccagagatgaagcccagagccgggacagagatccgcttctcagagctgcccacgcagatgttcccagagggtgccacgccagctgagataaccaagcacagcatggacctgagctatgccctggagactgtgctcaacaagcagttccccagcagcccccaggatgtgcttggtgagaaggaacaaggctctttgggagtgggccaaggggaggatattagcagaggtgttttggaatagggagtacatcttgtgttagtccagcagcaactaaacctggctaggaggctgaagatacaggtgtgtctttacccttagccctggagatttcgatttgagagatctggagtggggcttccgcagtttctatctgtctaataaacaaacatcctaggtgaacctggtgcagataatcttctgtttgggaaccactgatagagcccagtcctacagaaggaaaagatttggcccactgagtggctgaactgagacgagaacccaggactcttggtttctgggccagacctgtgttcgttgtagcctctcacctgcctgctcagtttgctcctgaccctcaagatgttggtctctcaactggcttagaacaggacagtgattttttttttaatcattacagtttttattgttaccttcccttttattacaaaaatgatagataataatcataaaagaaaaacaaaatttacttcaaatctcactacttagaaataaccatttaaacagtttggtatatttacgttcctttttttctgtgtatttctatgtatttcatttcaatgtcttctctgtttatttctatgtacttcctctcagtcttaaaaattcagtatatgtgtctgtatatatatgagtttttataaaaacaggattgaagtatattattactttgtaatctgccttaatataaatgttttttcatgtcactaacagtcacttttttagtggctgtttcatgttccatagttattggaccagttctctgttatggaccattgagatgctccctgttttctctattgtatcatcaagtggccgggtgtggtgactcacacctgtaatcccagcactttgggaggctgaggccggtggggatcacctgaggttaggagttcgagaccagcctggccaacatggtgaaaccccatctgtactaaaaatacaaaattagctgggtggtgtgcacctgtagtcccagctactctggaggctgaggcaggagaatcacttgaacccaggaggcagaggtcgcagtgaaccaagacctcgccattgcactccagcctgggcaacaagagccgtctcaaaaatatatatacatatatcatctagtgaacattctcgtgtgtacttacacatacatttagggatagaattgctgggtcagactgtgcatgttgccaggagaaggtttttgcatccttgctggctggtaggaacctgttgcccatcacctttgacagcattgggcatgacagtttaacaaaggcctcttccaattggatagctgaaaaatggcaccttgtttatatttctttatttcttaaatactagtgacagcaaatatgtgtcacattttgaacagctatttttatatatatttataaattttccaggtaatttgcatattttcttgttggaagttcagtgagaaatttgaatgtaggacttcttttttttttttttttttttttgagacagggtttcgctgtgtcgcccagggtggagtacagtcagtcacacaatcatgtcttactgccacctcaacctctcgggcccaagtgatccttctgcctcggcttcccaaagtgctgggattactgtgcctagacaggactttttatatcattggctcagctaatgatataacctatattttaacaggtacatcttttgttgttgttgttgttgttgttgttgttgttgttgttgttgttgagacggagtcttgctctgtcgcccaggctggagtgcagtggtgtgagttcggctcactgcaagctccgcctcccgggttcacgccattctcctgcctcagcctcctgagtagctgggactacaggcgcccgccaccacgcccggctaattttgttttgtatttttagtagagacagggtttcaccatgttggccaggatggtctcgatctcctgacctcatgatccacctgcctcagcctcccaaagtgctggaattacaggcgtgagccaccgcacccagcctttaacaggtacatcttaatgcattagtattttcgtataataagtaacttttaaaagtctggcttaaaaatgaatagaaatcctgtctttctacctcttaaacatttcaattcttcaaaatatatcttgcgaaaaggtctgttacaggaataactttgttggtttttttttttttttttttttgagacaaggtctcactctgtgacatgggctggagtacagtggcatgatcacaactcactgcagcctcaacctcctgggctcaactgagcctcccacctcagcctcccaagtaggtgggacttcaggtgtgtgccaccacgcccagctaattatttttggttgagatagggtctccctgtgttgcccaagcttgtctcaaactcctgaactcaagcaatcctcctccactgacctctcaaagggctaggactatccctgccaccgcacctgtccagggataattttgaatctacatcacacctctttgaaaaatataatttaattttagataaagtcagaaatgcacaaatttaataaatgtcctaaacgcaaataataggctaatatttagtttcacaaaccaagtaaagccagctgaagaagcaaatcattaacctatattatacaaagaaaatttgactatatttgaaaatattggtcagaaatccaaaatttctaaaccaggtagctattcacacaaatcaaacttagttccgtatgcttaggaacagggagctagtttttccaggtctctggaggtggcacagatcaaacgccatgcatttaaagaggtatttggtgttgagtacatctcttctttttatggcccacatgtatgtatacctcattaaatttccagccacctttgaagtagagagaatgcctgtgatgaggagcagtattctgtggtaaccagagacccagttacttgcccagggacagtggtgtctggatcatcaggtctctgtttgagatgggcatctgatagaaattgggaacataatattttttgagtgctactttgtgccaggtcttattctaaatgctatacatgtactatatccattcatgtaatctttgctacaaccctcaaataaggaaattgaggccttaatagattgagtaacttgcccaaggtcacacagctgctaagtggcagagctaagatttgaagctaggcagtttggctccagagcccatgctcttagccaccaagctgctcatagagattaaatcacagagccctgtggttaagcaaacaaaaataatctgcctggcaggctgaccctggaataagtactcatgaatttttcttttgtgggaggttccagaactgttcccacccaatggagaatctgttttatctttccgttgcccacattgtgaagcattagatgtgtggccttgggcaagcccttgaccttatctatgaaatgaggcaaataccatcttcctgatcgccttgtggagttgggctgagggttacatggtatagtgcagtatttcctgaccctggagcagaccatccacattagaatcacctggggagcttgttagagctacagatacgaaggccccatcatctctcctccaccagaacctctgagggtgaagcttgggtagctttacttttaacagactctcagtgattctgatgggcagccaggtttgaaatccacttggcataatatccatgaacacattttgtaaacttaaaatgccaggcaaatactgggaatacctcttctctagcagtctgattttatagaaatccaaagccacaggttggtttcccatggcttgaattcatagcggttcagcagacatctattgagtacctgttaggtgcaaaatctcctgccaggctctgcaggagtgacaaggataaaagctcatctgttgctgaggtccagtggaattcatggccttgtgaatagtgatggagagtgtcagctggtcctcctctccctcagaatcacttctcctctctgcacctttcaggtgaactccagtttgcttttgtgtgcttcctgctggggaatgtgtacgaggcatttgagcattggaagcggctcctgaacctcctgtgccggtcagaagcagccatgatgaagcaccacaccctctacatcaacctcatctccatcctgtaccaccagcttggtgagatccccgctgacttcttcgtagacattgtctcccaagacaacttcctcaccagcaccttacaggtgagcagtctttctgactgagctgatgcacatgtgggtcagaattgaggcaacagtatgtgttttgtttctcgctattcttccatgaccccaaaatttttaaatttcagtttcctagtcttgggatatttcctgcttttctctctcttactcaattgtaagtgcctctatgccagaaattttctctctgtaccaccctctccctacacctcgtccccagagtgcctaacactggggtacttggatttgaattcctcccactgctttggtttactcagcttaaaacagcgtttctttctccctgtagccatgaattgctacaacccagtaaagcagaattttgaagtttgttattcccagtgaaacatctgcagctccttagatctcatttaagcattaaaataactttgatttcctgttcaaacaaaatgtgccagtttctgcagagattctatgacagaaaaagtgaaatttgcttttaacttggcaattaaattttcattatgagtggtaattaggaaagaagcttcaaacaacttacaatcttcatcctatgctatttcctccctttgcaaacagattagtcctttatgtacttgggacagcctctgtcactcacattgtgtaactttctcaagaatagaagaggcagaagctgccactgtcagtttccatactttccctcccatgagcttctttcttctccctgtgtgtaatacccccatgaggcctgctccatataaggcagcctttcaccaaccttccaatcccactcggggtaacagaagggacgagcattcgttaaatattggggctgggcgtggtggttcatgactgtaatcccaacactttgggaggtgaaggcaggaggatcacttgagcccaggaattaaagaccagcttgggcaatatagtgagaccccgtctctccaaaaattaaaaaattggccaggtatggtcatgtgcacctgtagtcctagccacttgggaggctgagacaggaggatcacttagcccaggagtttgaggctatagtgagcaatgattatgatcgtgccactgcactccagcctgggcaacagagtgagaccctgttcactcattgaatccctttggagccttgtaagatgggggtattattcccattttacaaatgggaacacttgagaatggttaaatcacttacttgaagtcatacagctggcaggtggaggtcaggatttgtacccaggcctgagtcttggtttcctgcctgtgcttatgcccttgtgtagtgaacacagtgtgaatcccccagaaaggattcttgattgacatcagtgaagacttcatcgaggtcctgtttctcagaggtacagaacgcttttctaaagccaacctactgttggatgagtccctgtgagcaggcatctgacttaaagctggcagttgaaggacctgtgtaaaccatggcaatgagtcagtcaagcgcatgatttgagcctggtctgttccactcagaagagctataaaactgtccttttactggttcttcatataacagagaaattaaacccctttgtccttcctctgtggggaaaattttccccaaaggtactggttatgggttgtgaggcagtgtgaggaggcattagcctgctaacttgcctctggcagtggctgcttccctcctgatgcacgttgatgcgtcgcacagacacaggagggccacggtgttgctggctgtccagaccattgttagcacaaccagcagctgagctctataattgccaggctttgttgccagcaatgatttacaaagcagaaagtgcccagctggattgctagatgcccaggtgggttgtgcaaagctgatggttggaaacattcagtctttgaacttttcaccaagaaaattcgatgtcattatttggaaaaatccagggcatgtgccaaaacaaaacaaaacaaaacaaaaaacacatgtctttgagcattcttcatatataacattctactgaaagtgttgaggaatatatatacatgtgagttagccagggttcctgccctcaagggatttgttcattgatttagcaggtaattgctgagcatctgctgtatagaagactctgttctagaactgggaatatagctgtgagcaagacagagtcattgtcttgactcttgtaatttgagaaagttaacagaaagttaactagccaagtaactccagatagcagactcttgtattttgagaaagttaacagaaagttaactaaccaaatagcagtaagcaggtagcagtaagtgttttagaaggcagtcctgccctagtaccatttccctagccccggccttttggtctcacctagactgcatcggagtttaccagcctccgtgcttaccagttaccccatctctctcccacactgccacctgaggtgctgctccataatgcagctgtgatcctgcttctctgtggctcctcattgcgtggaaaattaaaagcctaaacattggtcgcaaaggccattctgatctggcttcttatcctgttctccagcttctctttcctctccgttttcccccatcaactccagcaacagtggtctctttgcaggttcctggacaggttatgctgtttcatgctttttaaaaaaaaaaattgttgtaaaaaacagctggtccatggtggctcacgcctgtgatctcagcactttgggaggccgaggctggaggatcacttgaggtcaggagttagagaccagcctggccaacatggtgaaacccccatgtctactaaaaatacaaaaattagccaggcatggtggtgggcgcctctagtcccagctactcaggaggctgaggcaggagaatctcttgaactggggaagcagaggttgcagtgattcgagattgcaccactacactccagcctgggcaaaaacagtgagactttgtctcaaaaaaaaataataaaaataaaattgtggtaaaaaaaaacacaatttaacatatatgccctcttaacagattttcagtgttcagtacagtattaaccataagcatcatgccatccagcagatctctagaacttcttcatcctgcataattgaaactttatacccatgtttcataccttcttgccggaacctgattttccctctccctggtacatatttgctcattctacaacatgccctcaaggcatccctctctgtcaagccatccctcctctctctgtctcaatctctgtctctctttcactctcccctttccctactcttagcttactttgaacttgtcgctattatattgcatgagatgtgcttgctgaaactaatatattgtctgcctgactcccgcactgagtcatgggctccttttacacgaggcctattttttgttcatctggttatcttcttcttcttcttttttttttttttttgagacatagtcttggtctgtaacccaggctggagtacaatggcgcgatctcggctcactgcaacctctgcctcccgggttcaagtgattctctggcctcagcctcccaagtagctgggattacaggtgtgcaccaccacgccaacctaatttttttgtatttttagtagagatgaggtttcgccatgttggccaggctggtctcgaactcctgacttcaggtgatccacccaactcacatctggttatcatcaatatgttgtcaaggcctaacatttatgtcatttggtgttattgggtgtttttagatggatagagttcataattcttgtgacaatgtaaatatcataggtataaacagtggagtctgatcaaagggcgttaggagcaccaaagagggagtggttaattctgactggggttgagatttgaggctttatgcaagggtggaaggtgggggcatttgaccatgcacttgagggatgactgagatttcaaaaggcacaatgtggagaaggatattgtaaaactttttttttttttttaatggagagtcacgttgatgccatgttggcagtgagagtccagttctccacacagaggcattcactcagggcatttgtgactgaatgaatcagcccataaaagccttcctcagccagccgcctgccctcccaggtagtcaagtaagtggaactggctgtcttacttaggagcttaaatggctactacccatggagagggactggtgtttgtgtgtgtgagcacttaaagacagccacattagcatggataaaatcagccgcgtaatggaattctcttagccattaattttttttcaactttcccatgtgaggcccttttgaatagaagccactggtttttacaaatcccttggatttcacttgaataaaagggatttgttttacaaaaatagatgcagttttttcttttatttaaagcaacgtaagtcaccataattcatttaaaaccaatgaaaggataatctgaatttaatgatatgttagaaagtgagttatgtacaaaataaggatttttattgttgattacgtagtacttaggcatatagtcatctaacctgtttttaaaaatacttctagttacaataggccgtatatgctttccaacttcctttgttgctagtattctaaatgtgtgttcatctttaactcttgagggaaaacaccaactctgacgatgaggtctatggtatttttatcacgatgcccactatgataaatttgcctgcctactcctacacctcttgccattagctatctcttttgcatgcttagtctcattgagccctcacaacagtgctagaagctaggtctctaatcccattatatagatgaggaagcaggctcaggaaggtcacataatttgctcaaaatcaacagagctagtgaaaggcaaggctgagctttacattctaaagcctatggtgggctcctgtatatgattagagccccagatgaaacatcccagatttttcaaactgacctcaggtgatctcatttatgctgctttttaccttcctggtcatcattgtgaaacaatagtcttgcttttaacaccactttcttctgctgcaagtggaaacaaaatcttctacctattgctagtttcattctaagttgaataattatttgggaattgaaaaaattaggaaatgtcatctttttggtctagctaaaaaaataggataagatagtgacatagctacctaccttgatattttgaatttctcgaggtgacctaactgaactcaatttatttaacttaggtttaagaaaagctttcacatgtgtgactaaagtaatttagaatttcataatacacagattaaatgattaaagtgttcatgctttattttgtgtttgaagaaaaacacccagtaggtgtgctttttgttttagataaatgcatttgtttgcaaaatattatcctatttcaaaagtattttttaaatattcagtattgatatgctgagattaaggtgatttatgtcccagtgacgttaaaaagtgttgacttgattttgttttagtgaataaaataactagaccactgttaagtttcctgaagaaggcgtaaaattaatctgaaaataaaagaatcagaataagttattgcttggaaactaagtactatttagacatcttcatttctgaattgtgaggagtttttacaaataccaagtttgtgaaactgtggtcaaaaatagaccaggaaatgccagggggtaggggtgaaggaagggtttgactgctaaggggccgcacaagggagctgtttggtgtgatgggatggctccatgtcctgattggggtgacggttacacaaatttatacgcaccttcaaactcagaactggataccaaaagcaaagcaaacactgtgaacatgtatcatatggtggttgcatgggggtatatatatatttgtccagattaactaagcatttaaaattgatgaatttactaatctgggcaacatagtgagaacctgactctacaaaaaattaagaagaaaaaaaaaataccaggcgtggtggctcatgcctctaatcccagcactttgggaagacaaggtgcgtggatcacttgagcccaggtgttccagaccagcctgggcaacatggcgaaaccctgtctctacaaaaaatacaaaatttagctaggcatggtggcatgtacctatagtctcaactactgaggaggcctagatgtgtggatcacttgagcacagaggttaaggctgcagtaagctgtgatcacatcactgtgctccagcctaggtgacagagtgagaccctatctcaaaaaaaaaaaaaaattatctaggtattcgtggcatgtacctgtagtcctagctacttgggatgccgaggcaagagaatcccttgagcccaggagttcaaggctgcagtgagatatgatcatgccactgcacttcagcatgggcaacagtgagatcccgtctctaaaaaataaataaaataaaatgaataaaattaattgtgtgtaagttataccacaataaggttgatttttttttttaagtcaacccagactatgccctgtgtcctggaggctgcagaagggacagtttcagaagcaccttggttccctacaaggcagtgctaaaaataaatatcagggatggattaagcctctgtcaagacaaaaggtctgggcaggcaaaggatgaagccgagatgcctctgctttgacaggactctgctcagcatttgtcactgcgtgttgccgcatgcctagtgtcttacctctgcagtgggaatagtaagttcctgtcctgcctcccaggctgtggtaaagatcaagttggtgagttctttaaaaaggacgaagcactttttaaattagaaaacgtatttgttagactgaaggtgtctgttttacctgcctctagtggaatttattcccaggcaatgtttgagaggtgctttgggaggatgggtgatgagcgtgagcccagtttgttccagcctgtcactcctggccattgccaagtgcagggcagtccctgggtctcaataggtcattcggtgagcaccctttgggccctaactctatacctggccctgggtgatatgctttgtggcacacattgataattgggacacaatccccacttttagagggtgcaaatcactgtgatacaagcacagtgtgaggaatgccatgagggaggctcgggcacagtgctggggaacaggggtctgagcagttcatgtcacaaggaggtttcttgagagccatggcattcaggggcctggtaaagaagctgccttctccttaggatgagcctttctttctccccagcatcaccatatcactattgaacagctatttggtgctaggcactgtacaaaagtgaaccccaaattgagtctgtggttgtcttcattcttctgttcattaaacatctaatgggtcctttttgtgtgtcgggcgctgtgccgagagtggagcacggtgtgaaagagccgctgctgtgaggttgctccgtgtctggtggacaagatcaacagcaaatggcctgttagcttactgagactgatcaaggtagccctggggctgagggaacgcagaggagcacctactccatccttggtctggaagagatcctcaaggaggtgatgtttgagctgagcctgagtctttaggagaaattcataggtgaaggaggagaaagcaggagatggaaaggtgttaagagcagagggaaaagcgtgtgtgcagagaggcgcagaggaagcagtggcacatgtttgggcagctgctcagtggctggagagcagggactgtggagagtcatccaattcccatgtaaggaagggaaacaggaagagacttgttaattcagcccagcagtctccccacaacctctggggatggcctcatgggtgtgcagggcctccagagctaaaactgtttgagagaaggcttctgtgctgtccataccaggcccctccccagaattcagccttgctccaggcgggctccactggctgcctacagacaggccaacccttggcttccccatggccctcgccaccaagatcacacagccctgctaattagttattgatctggtattttgttgtggctgcgcttcccactcctgtgtttagtcgattcccaagttaatgaagctggattctgtaccgccccccttcccccccatcacctctctgtgttcccactgctgctactccaacggaatggctccagacaaagaccactgaaaacgagccgcactcctgctaacaggaagacagcggagaagcaggtgggaggaatattccccctggaatcagctgcagaggacgcctgttgcctttgttgggtcaggtctcctgcggcccagcattttccatggtggcctgaaagccaactgtggcatgagggcgatgtggatcaaagagcttcttccaccgtcacaaccctgtgtctctgggtgggcctgtagggtagcagatggtagtctgggaaaaaccacttcttcctttctgggtaatttttattcagtcatttaactcctctcagcttccatttccttaaaataggcattctgttgtatctttccagggtattgggaggatccagttggatgctctgtgaaacttctttgaaaacagtaaaatagtataagaaggaatcatgggtttgctattactcttagggagggactgggatccaggacaatctggaatggggtttcagatgtggaaaaaattaccattctgctcccctgcccatgtttgtattaaatgaaactgttcatgagagcatcagaataaggggttgatatccagaatatataaagaactcctacaactcaacaatgcaaaaacaacccaatttacaaatgggcaaggaagttgaatggacatttcaccaaagaagatatacaaatggccaatgtgcacatgaaaacatactcaatatccactgatcattagggaaatgcaaatccaaactgcagtaagatactacctcctacctattagaatggcatgatttaaacacacagagaaaataacaggcgttggccaggatgtggagaaatgagaacctttgtgcattgctggtgggaatataaaatggtacggcccctgtgaaaaactgtggcagttcatcagaatttaaacagggagttcccgtatgatccaacagctccactcctgggtttctgtgcaaaagaactgaaagcagagaccctaagagatatgtgtacacccatgttcatagcagcattattcacgatagccagaaggtaaaaacaacacaaataggcattgacagatgactagacaaacaaaatgtggtatctgcatacaacagaatattattcagccttcaaaagaaaggaaattctgacacatgctgcatcattaatgaaccttgaaggatattatgctaagtgaaataagccagttgcaaaaggacaaatgctgtatgattccacttagatgaggtgcctagagtagtcagattcatagagacagaaagtagaatgtgggttgccagggcctggtgggaggagggaagggggatagggtagtcgaattcacagagttggaaagtagaatgtgggttgccagggcctggagggaagagggaagggggagttgctgtttaatggctgcagagttttggccggggatgatggggtcattctgaagatggatggtggtgatggttgtacaacagtgtcagtgtacttaatgctactcaactgtacacttaaaatggctaaaataatatgtatattttgccacagtttaaaaaataaaaatatttttaaatggttgaaatggtagatcttatgtacagatgctcctcagcttcacatggggttatgtcttaataaactgtaaatcagatataccgtaagtaaaaaatgcattgattacacctaacgtccctaacattgtagctcagcctcacccacctcaaacgtgctcagaacactaacactagcctacagttgtgcaaaatcatttaacacaaagcctattttataaggaagtgttgaatatctcatgtaatttcttgaatactgtactgaaagaaacaattcaaagtgcagcttcttctgaatgtgtatcactttgcatcatcataaagtcgaagtgtcataaattgaatgtaagtcagggtccatctgtatattttaccacaattaaaaaaaaaatcaaagacagcttttaagggggatagaagcctcaaactggcagcctgtggcccatttagaagattagagcagcaattcagtcgtgttggcttggggcctgggactttatgggatccaggggcttataagcacccccaagcctttcttaggaccttagtaccgactggtgtagctactacctgttcctctgggttactgcccgggtgtccagtagaaccccccagggggtggagccagggtaatggcccccagcctctgcccagatagtaattttccattctagtcctgccctagcatctcagctgggtttggaccttctttcttggtttggggggagcatagcaggtgtcctgggcctatgccagcagcagctgatctacccgccccagaagagccgaacaccatgaggaaatttccacagctttctcgccccctgccctccgtcttctcaggagtgacttatcctctgttctctgtaggttttcttttcctctgcctgcagcattgccgtggatgccaccctgagaaagaaagctgaaaagttccaagctcacctgaccaagaagttccggtgggactttgctgcggaacctgaggactgtgccccggtggtggtggagctccctgagggcatcgagatgggctaactcggggagcgctctcagctgcgaggggccccttcccacagggctgcagtcctggcctctccatttacttcttcccatcctgggacctgccagggcagcaatctctccaggtcctgcaaagatggagccagaattccctttttcactgataaatatatttcttcattgccaaagaggctgtacccatcctgaaggcacatttgtgggttccccatcagccaggccttggtgctaacctggctgaatttcacacaggctcttacacacacacgctcctaggagacatctgcctacacggcaaccatatttcctctgaatgagaaggaattgaaccaaaagtccaagaaagaactgattgcttgttccataggagcttaggaaacaagaaaccctggattgcccagggggtctgagaagttggttggtgactttttttgcggttaaatgaagggtgatggggagatcagcccgaattgccgcctgcctcttgctaaataggagcagaggacttggcctgcagctccttgggagcccttgattgggaagagagtttcaagggaggcagctggattcaatctagcaggtggtcagcttcagctttctccatcgaaatcccattctcctgtccagaggcccagtgggtcatctcccaaggtgggtgtggaccctggcctcagaggccttgctggtgctgtcacctcccacctgttccattccgaggcctcacccagaagtgggaccctccccttcctcaccagagccaccgtgactgtttctgatgacctggagagtcaacaacaaccagaaaggtttctgcccagagcaggcttcttaaggcctttacgaagttttgtgccttccaagtgctgaagaagacctggtcagcctaaatcttcccagtcccgctgtggagctgtcagtcaccggagtaatgagctcctggttcctcgggagtccttcgtgctgtgtggcagggttcctctctagacaagtacacaggccctgccaccctgacatcaaactgttgtactatgatcacagtccctgtgccatccttttccaagactggggctcacaccatgtttttgaatgagaatccctgctggttgagacttttgcttccacttgtttccttggagatgtttttccaagagcataatgtacattaaagtcttcgagttgagacaatccccttgtgtgtgtgtgtctcttgcagttaatccgcctgatctccagagcagccaggctactgtccatagacacacacctccctccagtgtatgggagacttgcccaacctctggagtctggaagaggcaggcagccagtgttcctcctgttcctcttgaggcccctgagacaggcacacaaggaagaagggatgaggccccatgtctcaataataacccaagaatcacctgatatgaattggctcctctttttctcccaaagcccactcatcagaactagctggggagcttgtgaaaactgtatctttaaaggagtgaagtcctgatacatgctacaacacggatgaaccttgagaatgtgctaagtcaaagacacaaggaccacctattatgtgattccattcacgtggcatgtccactagaaacaaatccacaaagagggagagtcaattagcggttaccagagaataagacagtatggaatggcagtgactgctgatgagtctgggatttctttttggggtgatgaaaatattctggaattagatggtggtgatagttgtacaaccttaagaatttactaaaaaccactgaaagtaagcacttgaaaatgattaattttggccgggcgcggtggctcatgcctgtaatcccagcactttgggaggccgaggtgggtggatcatgaagtccggagatcaagaccatcctggctaacatggtgaaaccccgtctctactaaaaatacaaaaaaaattagccgggcatggtggcgggcccctgtagtcccagctacaggctgtggcaggagaatggcgtgaacctgggaggcggagcttgcagtgagccgagatcgcaccactgcactccagcccgggcgactgagcaagattctgtctcaaaaaaaagaaaaaaaaagatttttatggtatgtaaattacatctcaataatttctgaaaatgcagattcccaagtcccatcctgcagaaattctgaagcagcaaatccagatgggacctgagttctgaggcacactcagttttaagtaacattacctgtaagtgacagcattgcgattagtacctggagcttccctgggacagaatttgtctcccatcagggcagtacctgaaagttggatcatgtaaccttgttctccaagcatgtcagtcagtattcctgtgtttacacagatacacgccccctacacacacacacacacacacacacacacacacacacagttaacaggttaaacaaaactagctactgtttaccaagggctctgttctgttacttcactgaaatcctcagcaatatgtggtaagtactccaactatccccattttgctgatgggaaaatgggctcagctgaaatcactctgccagggtcacagccagtgaatactgagaacaagagtcaggcccatgcctctggtgtccacagcccactctgccgcttcattcacagctccgatttccttccttgctggccccacgtgtccagggcagccttcccctctgccctgctcccagccttggccctgctgccagccagccgtgtgatcttgagcaagctgcttgttttctctgagcctcagctcctcgcatgaaataagagttggcttggggccgagcgcggtggctcacgcctgtaatcccagcactttgggaggttgaggcaggcggatcacaaggtcaagagattgagacaatcctgaccaacatggtgaaaccccgtctctactaaaaatacaaaaattagctgggtgtggtggcgcatgcctgtagtcccagctaatcaggaggctgaggcatgaacccgggaggtggaggttgcagtgagccgagattgcgccactgcactccagcctggccacagagtgagactccatctcaaaaaaaaaaaaaaaaaaaaaaaaaaaaaaaaacaaaaaggcttggatttaggtttctgatatagaatctgcgggctcccacaggtatttaaaagttgacccttgtgttattttaaatgttttgaaaacggaaactacatttatacaggataatatggctgggctgccaaaaaaaaaataggtctcttttgtttggggctgcagtgacatccactttaggtcttctcctgctcgtcccaacgggcagtcctctgtatgtctttgatgaataagaaatgtgaaaacagattaattattacttaatacttacagtatttttggaaggcagacgctttcggaacagaaccagtggtgttgctgatctcacgctcccttccagctctaacacatctacgtgtgaagctattggcaggacctggcctgatttaaaaaccctctcaaatgcaggcctcatggggtctatctcttatttgcaaggctggctcatcctattagcagaatcagcagaggtagcgactttctaaccccttccgctgtccccatgacaaaccctccctgctgtgagcctccctcgttcccatcgaatttctcaccacttgagcagtggaagagttccccactgttgactgcctcttaccattatctccccaccatcatccccttgtaaatattccttaatattcccagggcactgggacatgctggtctctccaactaatcagactttggcttgactgagatgctgtcccctgctgacatgggggctgaaaatgcagagtgaatgccacggtcaaggccagcactgagtcacgtccgccagattgaaatcaggaccatactcctttcaggggaaggctcacctgagctacccagtaatccgggagcccgtgtggtcctgcagctctgcagacgctgcttctcttttcagtcccccgctgactgtagatggcacttccccacctcagattcactggatctggcctggacaggctttgtttctgttagagctttctagacccttccatcttcagagcatccaaggtctccggtactggctagttatcccccaaccctgggctcctggacgggcctccctgctgagagatgggctgagtggtgggatgagagtgggaaataatgtcagctgctcactactggggggcagggtgcgcaggcattcatctggcactcagctccccctgtcccctgccccaccaccaccccacccacccccagcctgccaggcctactctcatgtgtcctggatctgtgtcgactccctcgatttctctggaaaataggaatcctgagccttgtcaggctgacagctgcttggtgggaggaggcaaaaaataggggcgtctcagttgcattgtccagtgtcaggtggccctgccctaaagaaactcaacatttccctcttccctgggtctttgtcttgctgcttctctctcctgatttctccctcttccctctgtccacttccaaaaagtgcacctggctcaggtctggcctctcacttctaagggatgacagatggagttacatcttcaggagagcccgcctgcagtgaggagcgttggagaaaaatgtaggaccttcacccaagaacagaggtgggagggctggcctaaggaggaggtctccacatactcgagagtgtagagtggggacccggggagaagccacagggtggctgaggtcagctccatgcctgtggcactcagggaccacagtaagctaacatcctcgtgggggagccacacagtaagcatgctaagtagactgcagagtgggcccatcctgagaaatgctcctgggaaacaaaatagagcagggtaaggggaacggagagtcctggcagggtgaggggagacgctgcatttttttttttttttttttttgagacagaatcttgctctgtcgcccaggctagagtgcagtggcgtgatcttggctcactacaagctccgcctcccgggttcaagccattcttctgcctcagcctcccgagtagctgggactacaggcacctgccaccacgccggctaattttttgtatttttagtagagatggggtttcaccatgttaggcaggatggtctcgatctcctgatctcgtgatccgcccacctcagcctcccaaagtgctgggattacaggcgtgagccaccgcgcccagccgagatgctgcaatttaaagggggtggcatttggacaaagatttaaaggtgagcaagtgagccatgtaggggtctagagagtgttcctgcagaacaaacggcgaaggcaaaggccctggggcaggagcctgtcttttgtattggaggagcatcagggggtcagggtcagtaggcaggagtggggtgaccaaagacgagaatactaggagaggaaaccagggaccaggttgtccagggcctataggctgttgtaagacctgtccattttatcagcgaaatgggcacacggttgagggtttcaagcagaagcgtgtcatgacctgacttccatgtttttgctttttttttttcgagatggggtctcactatgtggcccaggctggggtgcagtggctattcacaggcgctgtcactgcggcctacagccttaaactcccagagtcaagtgacccacctcagcctcctcagtagctgggactacaggcatgagctacacccagcagctgacttctgtttgtaacaggatcccaagctgctgtgtcggacacagactgcagggggtaagtaagggtggaagcagaaggaccgctaaggagctagtgtgacaatccaggtgagaggcagcagtgactcaggccacagtcgtgtcgggtgcaggctgtgctgtaccatgattcagaagatggatccaaagggatgtctttgatggtcccttctagcctgataggccccacttccccagggtcgcagatctgggcagaatgccaacttgttgggcccgcacccgcacaggagttacctcttgactgtcccatcatggggtgtgttgaaccttcctattctcagatgtccatggtacatttggggaggtggggcaatgaggaaggattgggagggctgtcacgggttttctgggtgatggggtggcagtggaggacttgaagtggctctgttgagaagcagtgggtgagtcagggccccctgatagactgtggttgcaccatcagcacctgtgcggatgttcttactgctgatgggcagtgaggatggtcccacttactgttcaggtgtccatacgactaaaagggaattgagggccaccgccgtggctcgcacctgtaatctcagcagtttgggaggttaaggcgggcagctcgcttgagctcaggagttcgagaccagcctgggcaacgtggcgaaacaccatctctacaaaaaattttaaagttagccaggcatggtggcacacacctgtagtcccagctactcaggaggctaaggcaggaggattgttttgagcccagtaggttgaggctgtgtgagctatgatcacgccactgttctccagcctgggtgaaaaagcaagaccctgtctcaaaagaaaaccccaaaaaacaggagttgagggcatgtgaattctctgtcggtactaatggttcttggttggaatcattcatacacccacttctgccacggaacttcctggacgtagaggtgattactaagagccggtgtgtgttgggggcttccctcctggctgccgggcactatgttaggccctttacttgccttcctcagtctggagcaccagctctccagggaaggcctcatccttcctcgttgtccagacaaggaagaaggaagccaaggccccgcaaggtgaagggacttcccggaaagcagaggctgctgagcccgcctggagttggagcccaagcctgtgaatctcaccccgcccttgccaccatgcagcgctcctcaacaaagatggttacttaatccaaggtcatcaccagtggatccgaggctgcagcctggcaactggcagtatcagtcacttacaagggtggcaggcaggacccactggcctctggggtcatgacactttgctgatatttccacccagaccctttgtgtctgcgtctgggcctctggagacaccggactgacctggcccagagcaaggtggtacctgcgggtggggttgcttctgatctggaaggagcctgcctctgccctccttgaggacaacgagggccagtgaggggccactcagggtggaatgcccgagcaaaggcctccctcctctcacccatccctgtcctaccagaactgctgttgatttttgcaaaaggcattttctttagaaagagatgctacacacaggtatggtggcttacacgtgtaatcccagcactttgggaggccaaggtggaaggatcacttgagcccaggagtttgagactagcctgtgcaacgtggtgagaccccttctctagaaaaaaaatttttttttaattaagaaaaaaaagatgctgcaaaagcgaagcccctgaggggctgactcaatgaccaaccatcctctggataggcctcgcctcagctgcccgccctgtgaatcaataagcgagacactgtcactccaaatacagcagcctgaaagcaggagtgggatagggctagttagaggagctctctgtggtccgcttgaatgaagaagacgacaccattattcatttcccttttggaaattgtctattcatgtcctttgtccctttttctcttagtgtcctcatatgtttttgaaactgtatttatcatatcacaaatacattaatatgataaatatttcccccagtttgccatttgctttttaatgttttgattttgaaatgtatgctttattttttatattacgtatgtcgagctttttccttttgattttttccccattgctttaatgcttaaaagtccattctcatcttaagacgaaatgtaattaatctatattttgttccagtttttcttagtgttttttttttttattttttattttgccatagtcaaaatcatgtttcctcagccccacctgctccaggaccactgccacctttcatgcctcacatctgtcctcgatttttcctctcctattaagtcctagcatgctgcctcacacctccatcctcatcccctccttggacatcaagggcttctcacaaaccttcctgacccctcccggcatttgcagtcagaagaaccacatacgtggctggctctgggtgtcagagtctggtggagcggagtgtttttcttattgcttctcagggactagaatcgtctgctcaagattctgcatgtccatacttggaaggtcattgattggaagattcccccctcctctctgtccttgcactaaaggcccctacaataagggttgctgttattttagatttcatagtccatttctgttcacctcttttctgatgtcaggcctcctttgctttcaggacaactttttctgctccctgtcatctttggtgggactgccaatcacagtacctcaccccatccttccactcaccgggacagacacacaactctagctaggccacctggcatcttccctgggatgcttcttcaagaaggcgcaaaaggaccccacttgcttttagagctgtggctctagaggactctcagttagatctactaggggtcatcatccccgtcacagaaagccctcgtacctgaaatgaggatgagcccaacacagaaggaagctgagctgagagacaagagcaagagaagccaagaaaaatatctgaagcacctggatccagccttgcctgcatcccgcaatccccaggcttcctcctacataagccaatacagtaccttttaatttgagccccattatgaaaggtttttgctaaagaatcctgattcacccctgcattgcaatgctttggacttcattgtctgcccccctgtaaaactcctaagatgtcaaagctgaaaggggctttagagaccacagtctcatcctgcagttggtgaaacgaagggaaagaacttgtccaaggtcacgtggtgcatcgtttcctgctcaaaaaagaaaaagcttgaactcactgcccagcagcccggacggcgctgtggcctctgcgatggcattgcagtgcttagtggctattgatctgttgttttggatgtgttacccagacaggattgccaccaccacacaagcgcatgtgcagcccagggagagctctagggctgggccagagcgggggtgggtagggcatcgttgctgctgcttcagcccctgtcgggagagaatgagaaaatggtggtgaacaagaccttgctggcatttgctgacactcaccatgggccacgcgccatgttaaatgggcgcagtagctttacatttgttctcagccttgcggcgtccctatgaagtaggtgctacgggaatccctgttctatcagcaggaaaacaggaacttcccaatggtcacactgcgattgagccacgcacttggactaaccagggtcagcctgactccagagcctgattcttgtaccaaggagggggcaaaatcaggcaggacacatggatgagtggaggcccatgcgaggactgtgggagagtgtgccttggctccccagctccggcccagggcaaccaattcaaggcagacttgtcagagcttccagtttttcaagagaagccggaaatctggacttttatgtgaaatgtctcatttttaaatgttggcaaagaaattcagattaaaacacacacacacacacacacacacacacacacacacacacacacacagtgcaagggaacccaaaccacatttgcaagccagcggattgcaacttttcgactttactatactctttctgtggctggaggaagctgttctaacccacaggactctgtccatcacctggcaggagaggggacctacctcgatgtggttaggatgccaccctgccttgctcacactcactcatttctaagtgtgtgtcagaggccagcgaattccagaagcagggattgggcagggcgggcggtggggcatgcgtgcttgccagggagggccaggagcacagaagaagcctccttatccaatgttacaggtgaggaaattgagaccaagtgaggccgtataaacagctgggtccccggtgactcatggaaagagctgctggaaccgggtgcaaggtcttcctgagccataagtatggtcctctgaggacacattaccctgctgttggcctttttggctggtagaggagacacttggattctgggatgtggcagatcccagccttgcccatgataaggataataaggaagtcactgatagtctatgagccccagtttcttcatctgtaaaatgggcatctcctctgtaaaacagaggcattggctctgccccatgccaatgtaaaactatggcacccagtcccagaggggtaggggtgacattcctctcctccaggagcaggggactgagccaaagatacctgcagcccactctgcggtgcctctggggctgggactgttctgggcacgtgctgagttatgatgacacatccagagctgagtctgtctctcccacctgcccaatcctctggggcaggagtgggggtcgggaaggtgaggggcggcttcacttccaggtcaccatccctcagccctgggcctgacacagagaagaatgagcgggaggatggatgaacagcatcataacagcagttctcgtccacaccccccaacccgtgtgccaagctcttagctcacgccatccttcagcccagcagaatcttgtgctgggggtggagccgcagccctgccctcatccattcatcacgcgtatgcaccccttcttttcaggcagtggctcccaactctccccagggctcagagttgcccccgagaccctgacccaggcccagccagggcagctatccccaaacttccatgggacacttggtgtcagctgcctccccccatccttggcctggtgggacctaggggctctcagctacccagccaggagatcggcccccagcagaatggccctacctcagcctgtctgtgtctttgagggttctcagcgcttcacctggcctcagaaactacctctcagcctgagggtccctacaaggctttggactgatgccccctgcctcagcataaatggtcaaggttgagccttatggcccccagaaggcagggctgagatccatagggtgaagccatgggaggcagatggaaaaccttagtgtgaggcacaacttaccatcaaagctgcctacaatggaatgggctttttttaagaggtgagttttctgttcccagagatttggaagtaaaacctgcagccaatggggctaacacacatccattaggacagcggcctcattaaatgactgtgaggttcccttccagttcttagaccacgaatctcctttctagggtttttcttcccagtccaccccctaagacagacacaggccttcgcaggcctgattcagggtggaggaaggggagtcccaggctgaaggcgagttgtttgcaacccacagctgggctcaggagcagggatgctgcaacccagctgcctttctgcagggccttcacctgtcctccaaggaccaaggccaaggctgatatgagccccccatctggcccaagaggttcccacaatggtcctgggtggtgggtcctgccactgggtaggtgtgggagctgggggttgcaggttcaacttggcaaaatgtcaggacacccacgggggcaggcagcttttcaggggcccaaggccatggagctccaaaggagggcagcagggagcacgcagataactgtccccacccagctcccctcccacaggctccacggatcgcactctgtctctctcgcatgctccaggagagacacggcagcacacacacaggcagacacaaccagcacccacatctgagcgctcacacacagatgcgtgtgcgtcgtgcagagacgcccacacggagacacagatacacaccctcccggagccacacagatgacacccacgtgcacgcgggcacaaacacaggccctacctacttgcaaaccaactccacctccagcatggccaccctggctggggaaggaaggccggccgggtgggtgccctggatcagcctccttgccgtgggagtcctgatcatctggaagctatggcctgccccgcccattggaggtctgcagggccaggggctgcccagaggcaacagagtagttccacagggccctggggtcagctgatctggctctggtctcagctttcccaccttctggctctgtgacctgggcaagtcactggacctcgctgagcttcagcgtcctcatctggaaaacaggcataacatagtgccaaccccctgagtcctatgatctctgtagcccccaggcctggaatatcctagacgttcagtaaacagagactgtttctgtcaccccagggcgggggctccattggcaaatggccactcacccattgcagcctggcatttggtgagtgcaccatattcgtgagctattattttcatgtctacttcaaggggctacctggggtctgaactttacttgtggggacccaggatgtaagcctccatgtccagactggcaaagagaaccccattcccctggcaaaggtagggctcagctaggtagtcttaaacaataagcagccactcagctagaacttagactggaatattcgcaatttaataccatggcattccagaccacagctgcaaaaaacagaggctcttgccagtgtgttttagactctcaaagatcttgaagcacaaatctcgaatgtcagagctgtacagaggccttggagacatctagtccagctgtcttgctcctaaaacggaatcccagaagcatggagcctcaaagaactttgagtccattccagaccagttggacagaaattgggaactgaggcccagagagggtgagccactgagcatggttgcacagtgagttagtggaagtgttgagaccagacccctggtcccggcttcatagcaagtttagattcagcccctctatggaggcctggaggaaggaaggcagaagaagaaacatttgggccaaagtgaggattttctggagaactgttttcgaaaaatcaaaccaaaaagaaaaatgggaaaaaggtgctggcttccccttattttctgcctgtcttcctctgggcactctctctctctgcagctctcagccggttccagctctgctcacaagctgcttccagccgcccacgggcttcctaaaatggtctctgcaagctaattccagaggatgaatggcagagagcaggcctgcagggagctggtggggggggggggcggggggggggcttccttagccagtgcaggtgcagacagacgccacattggtgttggaccagctgcccccaaccccaaccccctccttaggtgcttccatggcccccagctgccaggaccagggggcccagctttcacctctcactgcctgacctcttggaataggttatttttccttcttaaagaattaatttttaaaattatgtaataatacatatgtatcatcaaataatcaggaaagtataaagaagaaaattaagatcacctgtaatcagctcctctaaatgaaacaactattaacaattaagcatatatcctttcagtcttaggactcagcacatattacagacagaggggctgattcagtacataatgttctaagtcctgttcttttcttccaatcatatattcacaagcatctttctagtcaacatttgcacttccacagcatgatttttagtggctgcatggcaccttgcatatgactacaccacgctttgctcaaccaatccccaatgcccagcgttttagcttgtgtccatttctcccctgtgagaaacagtacatggtttattcttgtagttacctctttgtaatcaacctagttatttccttaggacaccttcctggaattggaattactggccaaagggtttatacttttttaaaaagataaaatgcaaaattataatactatcctcccttcctataatgaatgtgtaataattaggtaataaataaaaattagaaaatatagataaagaaaaataagagaaaaaaatcataactttccccaaatcttactaccaagatatggttaagaattttgctggaaagcatctagacttttttgtatgtgtgtgcacgcatataatgggattatactatacaggctgttttgtaaaactgatcatttgtttctttctttttttttttttttttttttgagacagagtctcgctctgtcgctcaggccagagtgcagtggcgcaatctcggctcactgcaacctccgcctcatgggttcatgccattctcctgcctcagcctcctgagtagctgggactacagggacccgccatcaggctccgctaattttttgtatttttagtagagacggggtttcaccgtgctagccaggatggtctcgatctcctgatcttgttttccacccacttcggcctcccaaagtgctgggattacaggcgtgagtcaccgcacctggccaaaactgatcatttgttcatgtcaatacataaatttacattcacagtgtcactttctttcttttttttttttttttttagagacagagtctcgctgtgtcacccagactgaagtgcagtgacttaatcatagctcgctgcagccttgaactcctgggctcatacgatccacccacctcagcctccagagtagctgggactacaggaagatatcatcacacccggctaattaacaacaacaaaaaaaattgtagggataaagtctttctatgttgcccaggctggtcttgaactcctagcctcaagcaatcctcccactttggcctctcaaaatgttgggattacaggcgtgagtcgccacacccggcccacggcatcacttttatctgccacagcatatttcattctgtgtttataccttggtataaccactctcctgttttggggaactaggtttctggttttgctccagtataaatagctctgtaatgaacatgcttggaaaagcagctttgcttcttgtccatatgcgttcgtaggctctgtggtagtagaattgctgggtcaagggtttttgttgttgtttgttggttggtttttgttttttgtttgtttttgctgttgatatcacatcgtttctgactggaagtctaaacagcaaaccagcacgcaggctccaccgagttccacagacgtctacgggaagggcccagaatctgtagaaccaggcaggagcttgtgctgcatttcctgctttccaggctgattgcttagagaaaggccttggccttgaatggggcctttgcccaggaagcctcctctgtgcccaggaagccgggatcaaaattagcccccccggaagccaggagcacacaagctggttcctgctggctctctccagcctacttcctgcatacccgatacctcacgtgccctcttcctgtctccagatcccactcacctgagaccatgcacagagggagaatgaatgtgacgtgttacaaagtcctcattgttctgaggaggggagagatgcagccagggcaggcagcctcgagactgggcaggtgtgagcccgggcggtgggtctcagaggtgcatggagggtcagcctggagaggacagaatgcggggccaacccacaggacaaggcccagagcaggaagggcctggagcctgcagaaggcaacaaggagaacaagcccgcagaaggacagggagggcctgcccagagcttccgagggtgctgacggccaggccggcctggacaccgtcttgtctctctccatccttcactgcgctgctctgctctctgcgatctcactccattcagagttgggaaaggaaagatccatctgaggaaaaggtgagctgagaactaaccagaaagagagggagggaacgggcgagggagggagagagaaaggaagaaacagagaagggaggagaggccaccacccaaaagaggaagccatgccatccaggtctcctgattgaccagcacaggtttaagtgaagaccttccctgtggtcagctcagcagtggctgcaagccaggctaggtggctcaggtctgtaatcccagcactttgggaggccaaggcaggcggattgcctgaggccaggagtttgagaccagcttaggcaacacagtgagaccctgtctctacaaaaaaattttaaaaaattagctgggtgtggtggtgcgtgcctgtagttccagctactcgggagactgaagtgggaggatcgcttgagcctggagttaaaggttgcaatgagccgtgatcgcgccactgcactccagcctgggtgacagagaccaagtctcaaaaattaaaataacaataatagtaagaggctgcaacagaccttcaagctgggagagcaggttttcaggcagctcaggaccacaatcccggttctaaaaagtgcgtgcaggcacgtctgacaacaagacagccatgcaggtctgggcgccagctaagagaggagggtcccacattaggttcagccatttcagcttctttccactcttgcctggcattgaattcccgtatttattaatcccctctagagcacaagtgagcccatccttgtgagatgagggaaagcatcagggctgtcctgtgcaaacccagtgcagcacagtgcccaggccatgtgcttcgacactatgggcagctgccgaggagacatctctttgagcaaagtctctctgttcatcaccctccccctccccagttccctttttgtcacttgattcaggtgggattcacctctccgtggcctctcctctctttccttccccacctctgcactctgggcctgctgggaacggaggagagatgggtgggccatggtgtgcttcgttcacaaacacccacccagcacccagatgtgactgggggaggctgggtgggcaatgacctgtgagcctgtaggccaccccctttcacccaggggacagcttctgggagcctgaggtcgggggtcttggagaaagaatagaagcacacccttggctccttcaggtgggggttgggtggagtggagagcagggctcttgcctgaacagtaatatcataaaactgtgaagagctggccgggcatggtggctcacacctgtaatcccagcactgtgggaggctgagatgggcggatcactgaggtcaggagttcgagaccagcttggccaacatggcaaaactccgtctctataaaaaatacgaaaattagccaggcatggtggcgcactcctgtaatcccagctccacaggagactgaggtaggagaatcacttgaacccgggaggcagaggttgcagtgagccgagatcgtgccactgccctccagcctgggagacagaacgagattccatctcaaacaaacaagcaaacaaaaaaaacaaaaaacacaaaatactgtgatgagttgacatttaagtgcgatcagtatgcgcctggaactgtcgagctggtaccttacttatggtcataggaggtgggtgccgtcatcatccccattttatagatggaggaaacaaggtgcagaggttgagtaactggcccaagatctcacaaccagcaggtggcagagctggatttggagcctgtgattgtcccacccagctaaagtctaatcaggctttctgtcctccaagctctgagaagccatcctcggcttcccagaacctttctttccttggtctgagctcccgacccaccccctgtctggactggagagaggaagtctggaagccacccagtctccatccagtaagaacacgctcctgcccactgtggccccagtgcctacacaagtgcctgcaatatagtagctgctcaataaagatttgctgaacaagggccaggcttggtggcatatgcctgtaatcccagctacacaggaggctgaggcaggaggatcacttgagcccagaagtttgagaccacacattgagaccccatctcaaaaataaaaaagtttgctgaacaagctctgccctgtgtagctggtgctgggactcacagcgggcctgcagcagtcaagagagaggtctggagccaggctgccctgtccggtcccagctgtgtgttgctgggcgagtcgccgcatacctctgggctgcacttctctgcctgtagaaagagagattccccagtgcctgcctccctttgtggggccctgaacaaacgctccatggagacgtagctgctgttattattgctgccattacccagggacaccatctgtattcgaccctggggctggcagaacgtggttctctcccccactgcccctctcctgatgctactggaagcctgcgggggtgtggggagcctggcctggcccaggtcctctcctcacccgtgtcaggaaagagaccctgtctgcacctgtccccagccccagccccagcccagctgctattcttagtccctccccatttccctcatctctaggcattttccctcctaaacttgctctgcgtttccataggaaccaggggagggtggagatggggagagggtcctcccccacggaagggaacttcatttggggctgtttgggagcggctggcagtgcctggtggaacttcccccactgtgcctctcccctcctccccagacccctccttgaacagcctgttcctccgaccgttatttttaatgcatttatcctgccgcttaatttatcccgcattgtgatcagatttagctgagagcgctccgcagcccggcctgcctgcatattcatgagtcggttcattcatgccgcccccagaatgccgggcaatagtgggcagtgcgctgcctggtccccgggtcccacctgctgcaagggcaaccgggggtcagaggtcaagggcccaggctgcagccagagagcggttgtagggtacagcacctgtgggtagggggtggggggtgtccctaggtggaggctctggagccaaactgtgctaacatctttctctgccattgctgataaaatcacttcacttctcagtttactcatctgcaaaaggggaaaataatgtcccctgccctgggtcactggaagattaagagaatacacataaatgatcacagtgggtattcagtgtagctccctgttgtcattgtcgttcctgctgagcagtggttcatcgtggctctggttcctggagaaacggggtggtgggctggggcatgagtctcctctggtgatgaggctgtgggctatttctgtccagcctttgctgactgtgatacgagctcctcccctcaagtgagggtcaggagggcagttcccaaaaggcaggagggaccagaggatgcagtctggtctctcaggaagggcccctgggatcgtccagggtgtgcagcccccaccaggggccagcagggaggctggggctctggaaggaggcagggctctagactccaggttcttctggcccttgggaacttctaggttgatcactcccttcaattattcattctgttattttactgttgccaagcccatgctgggctctggggacatcgccctgtcctcagggggactacatcccatcagagaggtgagtccaggctacggagtggtcagggccttcagatgaggccagatcaattgcctgggggttcagaaggggaggaaatcatcgcagctgggcatcagggaaggtttcctgtaggaggcagcatttaggccgaaccttgaaaatgtggctgtaacaagattggatggagtaagatggatatttggggtctaagggacagcaaaggcaaaggctggtgatgggaacgcaggttgggagaggtcagccaggtggaggctgggagattcctgagccccaggtgagggggtcccaacttacatcagccatcccccaaggtgggagccagaagggccttacctctgtccctcacatgtgtgtgtgcacacaggggtcacattccagcttgctggggaaaagagaagagctcctgcctgggtctcctgattaatctataattaaatcagcacggacgccacggaaccatgttgtcattagagagctggtgagggcagaccgggatttccctgggaaccgggaggcctgccgggtggctgcagcccatgccatgaacagatggccttcaggggtgaggagcaggaacgaaaggccagagcctcagccaggagtgagaaaaacagcagcttactcttggccatttacagtgtttctgtcactgtcttggttaatcctcatgacatgccatgggcgggaccaggcggggtattattatttactcgcattttacagatggagaaactgaggtgtagcgagccaagggatgagccagcctggatccttgggttttggaatcagagaatcgtgggtacgaaattctcttgccagctgtgtgctctcaggcagattgcttaccttctctgtgcctcagtttctccatttgtatattggggacaagaccctatcacttcaaagcattgcttaaggattgaataaggcagttcacataaagaacttagcacagtgcttggtgcttggcaaatactcatcaaatgctgctacttacacttcactgtaactgcttctctcttgtccatctttcttaccagaatatgggctccatgaggatagggactgtctgtcttgttaatttcatagtgttcaataaattactagtatgtgagacagcctttcgtaagctgcaaaatgctaaaacattagatactattttctctatgttctgccttgctttctctatgttctgccttgctctaaaaaggattcaaggagacaagtattaatattattatctttgttattatcactgttatgtaccaactctgttactcagaggtggttcttccttaaattaatatagaaaaaatctaggccgggcgtggtggctcatgcttgtaatcccagcactttgggaggcagaggtgggtggttcatttaaggctaggagttggagaccagcctgggcaacatggtgaagcccagtctctactaaaaatacaaaaattagccatgtgtggtgatgagaaggaaaaggagaaggagaagaaagaaaagaaaaggaaaagaaagaaagagagaaagaaaagaaagaaagaaagaaagaaagaaagaaagaaagaaagaaagaaaaagaaagaaagaaagaaaagaaaaaagtctagaaatagtcaaggagcctcaattcataggtggccgctaagaggtgaggcagagacctggcttctggagggaacatctagagacagctgcagaaacctctgggccaaccaaggagctacagcctgggaggccctggaagaactccttgctcttgtaatttgggaggctctggattttcagcaagaccagaggggctggaacctgcagcccactggctgcagattagatctaaggaatctgtctttgaagagcgagagggcatttggggatcatcattatctccgtggcacagtggtttccaccccctccactgggaactgaggtttcttacacaaataactgttaaagtcccagattcccaaatgagttactttaaatacgatcaattagagcagattcaaagttatccctgagacagtgtggccccatgcacctacattcttgagtggacagtgaaggaccagagctgtctgttgttcacagagcctctcttgcctcgagcccctgaggaacgatgactgttggctgtccctcacctgtggacatcacattgtagcacaggctgctgtgtcctgcccacattcccagaggtgcctgccagggctccctgtgactctcagcccgagactctgcacagagcccacttctctagaagtaccaagactcgattcccccggagctgccctcgagcaaggggcctgggggacggccaagaaggacttccttgcacctcaatgagacagtcacccacagcggcagctcctgtctccacttccctccctttcctggctcgttccccttgttccaagtaaactacttgcacccaactcctcatcccaggatctgcacttgggggaacccaacctaagacacactccaaaattataggtgctttattgtcctgcaggaatttttgagaggtgtccaaacctgtggatactcctgggagggcatccatcatatgagctctgagggcacctggggcttggtcgggtcagggtcgggggagcagtggtcagcagatggttctggtcaatagaggctgacgataaatcgaaagcctcccctcaatgcttcgcaggagcaggtgcagatcctgaactgaggactctgtgctgaagcagggaggcacctgatttgtttggtagtcaccaattaagcacctactgtatgctgaggataaaacaggtgaatgagatagcaaccatccttgtccctggggaggtctgagtctactggggaagagagtcatatcaacacatggatcaaggttagagatgagtgaagaacttcagaggactctggtaaattcatccattcatttaaggcatttattgagcacttatggcatataaggcaccgtgttaggccttgtggatgaaagagataggctatcatcacactactcagaaaggagacaaggtaacatctgacatttattaagctcctactactgtgtgcaaggcactgagtagggtgctttccatagtttatctcattcccttttgtttgcttgtttttgttttgttttgttttgtttatttatttatttattttgagatggagtctcgctctgtcacccaggctggagtgcagtggtgcgatctcagctcactgcaacctccacctcccaggttcaagcgattctcatgcctcagtctcccaagtagctgggattatagatgtgtaccaccatacccggctaatttttgtatttttagtagaggcggggtttcaccatgttggccaggctggtcttgaactcctggcctcaggtgatctgcccacctcggcctcccaaagtgctgggattataggtgtgagccattgtgtccagccttgttttgtttttttgagacagggtcttgctctgttgcccaggctggagtgcagtggtgcaatcatagctcactgtagcctcaatctcctgggctcaagcagtcctcccacctcagcctcccaagtagctgagactacaggcacgcaccaccacatccagctaatttttgtattttttgtagagatggggtttcaccatgttgcccaggctggaatctcatttcttatcacaacaaatccgttatgggggtaggtagctattcttatccccacacagagaagaggccctgaaagttgatgcaactcacaagaccacatggctgggaagtggcagagctgggcttcaacctagatctgtcggattcccaaccccccatactattttttccctcgcatcagaccacggtctgtggcttttgtcttaaatacccactgagtgaaccagtttttaaaagaacaaaacctggaagcaaaccaggccaggctcagatggagctagaacaagcgtttgctggggtcaagctcccgctccgaggccctgcctcatctacagggggcctaagcctggtctgtgacccctgtctgtagggaatccaggacacctggaagctgacctcatttcaccctgaagagtcagggaagggaggctcgggagaggccctgctccctgtgcccagtgggcctcccatgtggactgatacatggttcagcaaagcccagaccctcccaaccacctccccaaaggtagtcaaggcagagcctggctgctaatgggaggatgttcctgttattattacaggaaaaaaaaaaagtcagtctaaatcttagtggcttaaactaacaattttgctacgtttacagactctgtgggtcaagaatttggacaaggcacagtgggggtgtgagctccatgatgcctcgtgtctcacctaggaagattcagtagctggcggcaccatgacagctggcagctggaatcatctgaggatcatcacccacgtgtctggtgattgatgctggctgtcaggtaggacctcagctgggctgtcagccgaaacagctacctgtgtgctgtctcttcctgtgggctagtttgggcttcctcccagtatggcagctgagttctaagggcaagctgggttctaagggctctcttcccaaaagagccaagtagaagttgaatcgcttttatgacctaactttggaaatcacatagccttgcatcacttctgcaagagtcacaagtccacccaaattacagagagggggacacagacctcacctctcaatgggataacatatggaattggagatactgttaaggacatctttggccacataattaactaccgaaaacagtagggaggaattggctacccaggtgtgagttgttgcctcaagggtggaggggcagccagcattgaatgagagccagtctgaatggatgacagggagagcagtttggattgaggttgacttctgagatccaggcaacaaggccagagataccaaggcagaggttcagctggacgcagaggaacaagcattgttttatttatttacctactacccctccatcagtctggccacctggtctcccatctatctattcatcaatccacacatccatccatccatccatccatctacccatctacccacctatccattcatcctccatccacccacccacctatccatccattcatccacctattcatccatcacccatctatccatttatccatccatctatcctttcatccatccatttattctacccacccatgtatcttattcactttcactatgactcagtttcctcatctgtaaaatggggatcgtaatataaacctcatgggattgtttgaggagtcaatgaattgataaatgtaaagtccccagcacatattaagagctcgataggcttggcacggtggctcacgcctgtaatcccagcactttgggaggccaaggtgggcagatcacaaggtcaggagatcgagaccatcctggctaacacagtgaaaccccgtctctaccaaaaatacaaaaaaattagctgggcatggtggctggcacctgtagtcccagctactcgggaggctgaggcaggagaatggagtgaacccgggaggcggagcttgcagtgagccgagatcatgccactgcactccagtttgggcgacagatcgagactccgtctcaaaaataaataagtaaataaataaaaataaataaaaaagagctcgataaatattatcaatttttattaacattagtatgattcttactgttattcaggcatgtacccacctataaatctatcttcccatccactctcccattcatctgttttttttcatttattcagtagtacagttaaccatatgcacatttaatttacatgagttcaattatattcttagcaataaagaaagacagaaaacgaattttaaaagcacagttgacttttcgtgccatttttgtacaatgggtgtgtggcccagaaggagtatgaggtgagccatgttactaattgcggggttggggtgagagcaaaaccacgtagctgcatttctggggcagtttattggattttacagggtaattttaactgttcatggttcatgctgactttcctaccttttagatggcatgggacccacctctctgtgatgtgctctggctggctcccagcagcacagatacagtaggacctggtccctgccctcaatatactcacagtgcatggcacgttcagtggcacagacacataaacagaccatgatggtgtagtataaaaaattcaagctggagaagcactgtgggcaaatgactgctgtgaggagggcaaaaagagcagcagggaggcctttgtgagtgtgtgacatttaaacaaaatcttaaagcttatgagcataaattctcaagacactcaagaaggagaagggcgcaccaggcggagggaacagcacgttatgcagagagatgaaagatcacagggtgtggagagaatggagagcagggtgggagggcaggagtggagggacataagtctggaggtgtcatcggggctgatctgaaagggcctatggtaccaagccaggggatcttgggctctattctgcaggtggcgggcagccgtggagaggattaggcagaggagaggtagggtcagagttgtgttttcaataaatcgctcctgctgctgtgtgatggttgaacaggaaaagaaaagtctggaagtacagagaccagagagggaggctgagccccacccggcttctattgagttctgggacggtggggctaccacagaggaggcctgaagacagtgaaccaagggccccgttattgggcaaatttaccactttgggcttgagattcccaatatatggcctcacaagtgttttaagttgaaggagcagatggctctcctcagggtcagctagagggcttaggttctgcaccccataaagtctgcctggggctggaaagggctcttcactggatatatagtgtcgttttattgttttttgttttgttttgttttgtttttttcttttttgagatggagtcttgttctgtcgcccaggctggagtgcagtggcgacctcggctcactgcagcctctgcttctgaggttcaagcgattctcctgcctcagcttcctgagtagctgggtctacaggcacgtgccaccatgcccagctaatttttgtatttttagtagagacggggtttcaccatgttggccaggctggtttcgaacttctgacctcaagtaaaatgcctgcctctgcctcccaaagtgctgggattatagatgtgagccactgcgtccgacctgttgtttgttttttaaatttatctcccttagggttcattttgactcctgaatctgagggttcatgtctttcatcagttctggaaagttctttgaatgctacctttcgcccattctctcaattatctcttcttggaactcgaagtagaggttgtcagacctttttcatctatcctttgtgtctgtcttagttttccctccatttctttctgctgtattctggacaatttcttcagattccaagtcacattttttttctcttcagctgaggttaacaacctgttgtttaacacttctaagagttaaaaattctaattattgtatattttttatttctggaagtttggcttggttctttttcaaacctgcctgttctttctgtagcatccctcactgcatattcattgtttcaagctcctctattctgtctgtaaacacatggaatatatttactgtattttacattttgaatcctacaataccaatatctgaagtctttggggatctgactttgttgtttgctgtttcttctgttttgctcagggtggcatgtctcttggatgctttgaattttatttttattttcagttggacctatgggaatttcactgaggaccaggctgaaggtgttttcttccagggagagtgcaaaacatttaaattgaattgttattgaggggaacatacaatagagtgcattaatcttaaatgtacattttaaatggatatacatccccataaccatcatccagatcaagatatagaacgttctcagcactgcagaaagtttcctcatctccctttccagtatacctgcaccccgagagggaaccccattctaacttctaccaaatcactgatgagttgtgaaatgatatacaaatgaaaccatatagtacattttcttttcttgttttcgagacagggtctcactctgtcacctaggctggagtgcagtggcacaatcacagttcattgcagcttcaaactcctgggctcaagcaatcctcccacctcagcctcccaagtagctgggactacaggtatgcaccaccacactggctaatttttaaaaattttttgtagagatggggtttccctatgttgcccaggctggtctcaaactgctggcctcaagtgatcctctggcctcagcttccaagtgtgctgggattacaggcatgagccaccttacctgactgtagtattctttaacttgatgtatatctgtgagatgcattcatgttatcccatgtggtgatactgtctttattttcatttctgtgtagtattccattgtatgaatatatcacagttgggttttccattctcctgatgaggtctccaagttacatttgggtaatttctggttaggaactatgatgaataaagtttccatgagcattcctgtatatttcttttggtgagcattgcatttatttttatagggtaaataccccagagtgaaattactgggtgatggaatatatggatgtttggctttagtagaccctgccgaagttttccagggtggttgtgcccatttactctcccaccagccgcatatgaggattctgattacatccttcccagcacttggcattgacagtttttaacatttgccattgtggtgggagtgtagtggtatttcactgtggtgttaatttttattttcctgatgattaatgatgtagaatacctttccatgtctattggctattttgacctatttgatgtagtgcagtctgttgcctccttttttctgaactcaattaagtggaattcactgcaaaggtaaagtggcttatattccaagttatgtaacacctccagcacagtgtagggcagtgatgtgctggcaaactggttctcagaatttttttttttttttttgagacaaggtcttgctctgtcttgcaggctggagtgcagtgacacaatctcagctcactgcagcctcaagctcctaggctcaagcaatccttccacctcagcctcctgagagttgagactacagggtgcgctgccacacccggctaatttttgtatttttatagacagggggggttcaccatgttgcccaggctggtctcaaactcctgggctcaagtgatctgcccgcctcagccacccaaagtgctaggattatggacatgagccaccgcgcccagccagattggccagattttttttagtagcctgatttgcagtattttctgatttctatgatatacatacttcaaccatagccaatttcaagctactgaatggcttgcaaaactcctgaatatttaacaaatggctcccatgagccaggatggattggctccaggataccactgcgtctagggtagcacctctaataaaactaattgatatttctgcagcaaactgtgtaaatattcacactaattggtgtaaaacatcttcatatccattgaggtcagatttttgcgtgcaaagaatcaaccatgaattaactgtaaaagaaggactttcagttgagaaagatctttggattttcacattgcacgtaaaagatagtgggtctgtttctgcatggattccactgtctgcagatttgctgatactgttgggatccttcgggaaatcctggtgacctttgtgaacagcagtgaacaatgattttgagctcagtgatgtccaaggtccctttagttctagaagtctatggctaaaaatttaagaaatatttcactaactgcccatttggctttatttctattttagtactactgtgggctggagtcttttaaaacatggtttctggagccatggagagatggtttctggtaaacccagcgctcgcatggtccttcccacagaaggttctggagtcaggctgcctagacttaaatcttggctccaccactggcttgctcttggatttggggcaagtcatgtgaaatccttctgtgcctttgtttcctcactgatcatgaaaactgaagtgtgaaaaaaggtggaattcctgaggcccatctctgggctgcccactgggggcttcctcagacacaggaccccagatggcattgagcatcttgagtcagccagcgttggccagtggaggggggcagtttgcagtggccacaggagaatcttactccacacgacttagtgccccggtgtttccccatcttccctgacgcagcttctttgtcagtggcgctcaggcccaaggcccatcccttcctcaagaaatcctgctcctacttgaggaaacttggcatccagggcctcccccaaccctggcaacagttcggaatccaccactgtgagatatctcagacctggtttcttgagtcttttgcttcctgtggggcctgtccggagaccctgatttagatctcgcctctctcccctccctctagaggcagtagaagctgtgaccaagctcatgctttgtgtcctggaccgtctgggccaagagaaggccacctgccggaggcagggccagtggccactcttgttgggttctcatcattaaactgttgttctgatgcctatttgtaaaattgggttgtctgtcttgttcctgtaggttcctgggagctcttccgtctggctatcagccatcagttggatacctatattgaaaacataatgtctcctagtctgaggcttgtcttttacctctcctaaatgaagagttcaatattaatgaagtctaatttatcattattttcttttatcattagtggttctttgtttgtttttgtgagacagggtcttgctctgttgctcaggctgagtgccgtggcatgataacggctcactgcagcctcaacctcccaggctcaagtgatcctcccacctcagcctcccgagtagctgggactacaggtgcacatcaccatgcccagttaattttcatatttttttgtagagatggcgtttcaccatgttgcccaggctggtctcgaactcctgagctcaagtgatcctccttcctcagtctcccaaagtgctgagattacaagtgtgagccaccatgctcagccactgtttcttatatcttttaggaaatgaagatatttattcatattttcttctagaatttgtattgtttttgtttccacatacagatctatgaaattgatctatcttgcaattaattatatcttcaattaatttttgtgtatggtgcatgataagagtcaaaattcctttttgtcatatggatatctagttttggtggcattatttattgaaaagaccaccctttcccccactgaatttcaggatacatcatgagccaggtgacatggcatgggtccagttttggactgtcgtcagtacttcgatctatttgtctttgcactaatgcccactgtcttgattactatagttctatagcttatttttatttaacctttttgtctcgagagaattgtagatttgcatacaattgtaagaaagaatacagagagatcccacattccctttacctggtttctcccaatggtaacatcttgcaaaactctagtataatatcacatctagaatgttgatattgatgcggccctctggtctaattcagatttccccagttttacctgtattcatttgtgcatgagtgtgtgtgtgtgtttagttctgtacaattttatcacctgtgtaggtctgcgtatccacacagagtgaagcttcagaacactttcatcaccaccagaatctcgtgtttcccttttctcagccacacccgccacccttccacattctctctccaccctactcctaaccccaatccctgacactcactaatctgttctccacttctgtgtttttatccagaaatgttatataaatggaatcgcacaatagcttttcgggattggcttctttcactcagtgtaaattcccttgggatgcacacggtggttctgtgtgtcagtagtttgttcctttttattgatgagtggtattccatggtgtggatgcaccagtttgtttggccattcatccgttgaaggatatctgagttgtttccagtttggggttactatgaatagagctgctataaacaatcatgtgaacatgatttttgtgtgagcataagtttctatttctcttggataaatgcccaagagtgcaatttctggggtgtatggtaattgtatgtttaggggtttttttccaattggttttattttgtagagccatcttaaattcacagaaaaaattgaatggaaggtacagagagttctcatatacccccatccctacatacgcagagcctcccccacctcaaaatcccaccaccagagtggtacattcgttatcatcaatgaacctaaattgacacatcattatcacacagagaccatggtttacattagggttcactctggtgtacattccatggcttttggcaaatgtaaaacgacatgtgtccctcattacagtgttattcagatcattttcgctgccctgaaaatcctctatgttccacccactcatccctctctacccccaacctctggcaaccacctgatgcttttactgtctccataattttgccttctccagaatgtcatatacagctgacacttaaacgatgcaggaggcaggggtactgaccctttgtgcagttgaaaatctgagtataacttttgacccccaaaacctaactactaataacctactgtttactagaaagaagccttactgataatgaacagttgattaacacctatgttgtatgttatacgtattatatactgtattcttacaatcaagtaagccagagaaaagaaaacgttattaagaaaaatcataagaaagagaaaatacatttactattcattcagtggaagtggataatcataaaggtctttatcctcatcatcttcacattgtgtaggcagaggaagaggagcaagaggaggggttgatcttgctgtctcaggggtggtggttcatgtgtgagttttttcaaattattgcaaatttcaaagttgtccaatatatatatatttaaaatccacatataagtggacctgtgtgattagaatctgtgttgttcaagggtcaactgtagttgaaatcatacagtaggtagccttttcagattggcttttttctcttagtaatatgcatttaatatttctctatgtcttttcatggctagatagctcatttctttttagtgctgaataatatttcattgtctgaatatagcacagtttacttgtccactaacctactgaaggacatcttggttgcttctgtgttttggcaattattaataaaactgaaatagactttcaagtgcaagtttttatgtgacataagttttcaattcatttgggtaaatactaaggagcatgattgctggatcagatggtaagagtatttttaattctgtaagaaaccaccaaaccgtcttccaaagtggctgtaccatttgcattcccaccagcagtgaatgagagttcctgttgctccatatcctcaccagcgtttggtgttgttagtgttttggatttttgccattctaataggtctgtggagtggtatcttactgttgtttaaatttgcaattatccaatgacatatgatgttgaacatttttcatatgcttacttgctatctgtatatcttctttggagaggtgtctgttaatgtcttttgcccagttttaagttgggttgtttgttttcttattgttgagttttaggagttcttcatgtattttagataacagtcctttaccaagtatatcttttacaaatacagtcatgcaccacataataatgtttctatcaatgacaaaccacatatatgaaggtggtcctatgagattataatggagcttaaaaagtcctattgcctagtgacgtagtagatgtcttaatgttctaggctgacacattcttcatgtgtttgtagtaatgccgatgtaaacaaacctaccgtgccgccagtagtataaaagtctaacatatacaattatgtacatttgaccatgataataaacaactgttactggttatgtatttactatatcatgtttttattgttattttggagtgtacttctaccattaaaaaaagtttacttaaaacagtatgccatggtatgctggcagcagctcatgcatctcatgtttatttttgtacagctgtacaatgtgtttgtgttttaagctaattgttattacacaagaggcaaaagttttttttgtcattgttttgttttgtttttaagacggagtcttgctctgttgcccaggctggagtgcagtggcacaatctcggctcactgcaacctctgcctcccggattcaaagaattctccctgcctcagcctcccaagtagctgagattacaggtgccagccaccatgcccggctaattttgtatttttagaatagacggggttttgccatgttggccaggctggtcttgaactcctgatctcaggtgatccacctgcctcggcctcccaaagtgctaggattacaggtgtgagccaccgtgcccagccaaaaagtattttttaagtttaaagtttataaagtaaaaaaggtacagtaatctgagttgagctcttgctgcattttgagagttctttgagagttctaaggttaatttattattgaagaaagaaaaatattttttacaaatttagtgtaccctaagtatacagtattcgtaaattctacaatagtgtacagtaatgtcctcagccttcacattcattcacacctcactcattgacttacccagagcaactcccagtcctgcaagctccactcatgataaatgccctatacaggtgtaccatttttaaatcttttacaccatgtttttactgtagcttttctgtttagatatgtttagatacacaaatatgtaccattgtgttacaattacctagagtatacaatactgtaccatattgtacaggcttgcagtctaggagcaataggctataccatctggcttaggtgtatagtaggccatagcgcctgggttggtgccagtatgctgtatgatgttctttgcacaaggacaaattcacctaatgaagcatttctcataacatatccccatcattaagcaatgcatgactgtatttcctcctagtctgtggctcttcttctcattctcttgatattgtcttttacagagcagaagtttttaattttaatgaaacccagcttataaattatttcttttatgtctcatgcctttggtgttgtttgtttgtatctaaaaagtcattaccattcccaaggtcatgtaggctttatcctatgttgtcatctaggactttaatagttttgtgttttacatttacgtctatgagccattttgagttaatttttgtgaaaggtgtaaagtctgtgtttagactctttttttttttttttttggcatgaggatctccagtttttccagcaccatttgttgaaaagactcgctttgttcctctgcattgcctttgcttctttgtcaagtatcagttgactatacttatgtgggtctatttctgggctctctattctgttccattgatctgtttgtcttttctttcaccaatgaccacattgccttgacaataatagctttatagtaagtcttgaagctgggtagtatcagccctccaactttattcatcttcaatgttgaattggctattcttggtcttttgcctcgctgtgtaacttttagaatcagtttgtcaataccctcaaataacttgttgggattttgattgggattgcattgactctatagatcaagttggaaagaactgacatcttgacaagattgaatcttctatccatgaacatggaataacattccatttattctgttctttgatttctttaatcagaagcttgtagtttttctcatatagatcttgtacatatttttgttagatttatacctatttcattttggggatactaatgtaaatggtattgggcttttaacttcaaattccacttgtttattgctggtgaaagtaattgatttttgtatattaactttgtatcctgcaaccttgctataattgcttattaattcccagagtttatgtttaattttattttttaaaaacctgtcatactgttttctagaggggctgtaccactttacattcccactagcagcatatgagtgattcagtttttctgcattcttgcaaaatctggtgttgtcactgtttttcactttagcaattctgataggtatataatgctatctcattgtgcttttaatttgcttttcctgatggctaatgatgatgaacatcttttcatgggcttatttgtcatcagtatatcttgtttggtgaaatgttcactaatgtcttttgcccattttcttattggattgtttgttgttgttgttgttgttgtttaaattattgagttttgagagttctttatacatcctagataccagccctttgttgtaaatattttctctccactatatgttttaatataccctgaaatctagtaatattagtcctatagcttcatgctacttcttcagtatagtctctgcagttgaaagtccgttggatttcatataaattttagaatgagcttatcaagttcccaagaggatgttaattgggattgggatctatagatccatgtgagaagaactgacatctttcaaatcgtgaaaaagtgctgggattacaggagtgagccatcgcacctggccatatttgttgattttttttttttttttgaaacagattctcgctgcgaacatgatatatctccccatttattaggttctttttttcatttctttctgcagtgttttgtgattttcagtgtaaaagtcttacacatctttcattagagatatttctgggtattttatgggttttggtgatattgtgttgtctatttaaatttctttgtttcggccaggcacagtggctcatgcctataatcccagcactttgggaggcccaggcgggtggatcacctgagttcaggagttcaagaccagtctgctcaacatgatgaaaccccatctctactaaaaatacaaaaaaattagccagatgtggtggtgggcgcctgtaatcccagctactcgggaggctgaggcaagagaattgcttgaacctgggaggcggagtttacagtgagccaagatcgtgccactgcactccagcctgggcgacagagcaggactctgtctcaaaaaataaataaataaataatttttttgtttgttgctcatatgtaaaaatacaaataatttttgaatatttgtttgtgtatagagactttgctaaactcacttattaactctaatagtttgtagattcttttggattttccacattcacaaaatgtcatctgtgaataatgatatttttattccttcagttccagtttgtacattttttctcatctttttgcactgactaggatctctaatacaatgttaaataaaaataatgacagtagacagttaatctaaagggaaaagcattctaaatgtttttcaccaataagtgtgatgttagctatagggttttataggtgcccattataaggtaagagaagaccttttcagtttctagtatggagaatttttattttgaatgggtattgaattttaccaaatgttttccacttttttaatttttttcccacattttttgaaatgatagttttttagaatatttttgaagtggtgaattatattggttttttggtgcagtggcaagatctcggctaactacaacctccacctcccgggttcaagcgattctccatctcagcctcccaagtacctgggactacagacatgcaccaccaagcctggctaatttttgtatttttagtagagacggggttttgccatattggccaggctggtttcgaactcctgacctcaagtgatccacctgcctcagtctcccaaagtgctgggattataggagtgagccatcctacctggccatattggttgatttttttttttttttgaaacagattcttgctctatcgcccaggctggagtgcagtggcgagattctggcccactgcaacctccacctcccaggttcaagtgattctcccacctcagtctccccagtagctggaattacaggcgtgtgccaccatgcccaactaatttttttgtatttttagtaaagatggggttttgccatgttggccaggctggtctcaaactcctgaccacaagtgatctgcccccactttgcctcccacagtgctgggattacaggtgtgagccactacgcccggccatattgattgatttttttttttttttaatggagatggaatctcactctgtcacctaggctggagtgcagtggagcgatctcggctcactgcaatctctgcctcccgggttcaaacaattcttccacctcagtctcccgagtagctgggaccacaggtgcatgccgccatgcccagctaactttttgtattttactagatacggggtttcactgtgttgcccaggctggtctcgaaatcctgagctcaggcaatccaccctcctcagcctcccaaagtactaggattttttattttaaaaatccgatttttgaatttaaaagcaacattaaattcatgaaataaatcacatttggtcatgttgtattgtgctttttatatatctctagatttattatgttaatatttgtttagtatttttgcatctacatttatgtagatattggcttataatttttcttttttgtaatgtaaagtgagtcaggaaatattcataaattgagtcaggaaatattccctcctttactattctctagaagaatttataggattaatgttctttattctctaaatatttgggaaaattcaccggtgaagccatctaggcttagataatttttgtgtgtgagaaggctttaaattagagattcaatatttaaaaataggtatagggctgttcaaaatttttatttcttcttgtatccttttggtaagtaatgcttttcaaagaatttgtccattacaattaaattatccaagttttggcataaagatgtttacaatattttcttattgccttttaaatgtctatagtatctatgggtgcagagctttgggaggccgaggcactcagatcacttgaggtcaggagttcaaaccagcctggccaatatggtgaaaccccatttctactaaaaataggaagccgggcatggtggtgcgctcttgtagtcccagttactcgggaggctgaagcaggagaattggttgaacccaggaggcggaggttgcagtgagccaagattgcaccactgaactccagcctgttggacagattgagactctgcctcaaaaataaattaattaattaattaaaatgtctatagtatctgtagtgatgccctttcttcattcttgatgtttacaacttatgttatctctctctctctcttcatgatccttttcaacgaaccaacttttggctttgttagttttcagatccatttaaaatggaattctgaggctgggcgcagtggctcacgcctgcactcccagcactttgagaggccaagatgggtagatcacctgaggtcaggagttcgagaccagtctggccaacatggtgaaactctgtctctactaaaaatacaaaaattagccaggggtggtggtatgcgtctgtaatcccagctactcggaggctgaggcaggagaatcgcttgaactgggcaggcagaggttgcagtgaaccaagatcacgtcactgcactccagcctgggtgacagagggagactctatctccaaaataaataaataaattctgagcttgaattttttggtatcacataaatatttagaattcaggccttgaatccatgtgagggccagtcagtatccacaacttctcagaggttactcctctttaatcccacccagacccaaagctgagacagatcattttctttgctgtctgtcttcatggggcaggattaaaaaaaaaatcacgcctttcctgagtccataatttatgtagggtgagctctgactcatttggctgtctgtcctgtacaggttgcaggctttgtattacctgagttagagatgtctgcatgacatccacaacgccaatgtaggctgatctctcaggactcatattcctgctttgtttctggcacaagagaatttctctactttcttgaagacttattcatttctatataatgtttaaaatctatagcatttgacagtggtgagaacgtagtatttctcaccttagggtgtttgtattgctgttccctccagctggaatgcttttcaccgagatatctgcagggctgcctcctttgctctgttcctcacaccttaccttctcagtgagtcctaccggacttccctatttaatcatcttcatcaactctagcaccccctattccccttaccttctctgcttttcctttttttgtttttgtttgctttttttacacagggtcttactgtgttgcccaggctggaatgcaatcatagctcactacagcctccatctcctgctctcagatgatccttctgcttcagcctcctgaatagctggggctgcgggcacacaccagcacacttggctaatttttaatttttttagtagagatgagatccggttatgttgcccaggctggtctcaaactcctagactcaaacgatgctctcctcccaaaatgctaggattacagacgtgagccaccatgcctgtctctttcctttttgtcatagaacttatagccatctgtgtcatttactgatttatcatgttttttgtttattgaccagttccttttgctagatgtaagcttcatgaaggcaggttctttatgttttctttactccaaattcctaaaacagtgtctggcacatagcaggctctcagtaaatattctctcagtaaatattcttttttttttttttttgagacagagtcttgctctgttgcccaggctgaagtacagtggcatgatcttcgctcactgcaacctccacctcctgggttcaagcgattctcctgccttagcctcccgagtagctgagactacaggcgcccaccactatgcccagctaattttttgtatttttagtagagacggggtttcaccatgttggccaggctggtctcgaactcctgatctcaggcgatccacctgcctcagcctcccaaagtgctaggattactggcgtgagccaccacgcttggctcagtaaatattctttaaaaaagtgtccagaaactgagtccttttattggacagaggggaaaacaggagtgcagagagggaaagggatttgtctaaggtcacctggagagatggtggcagaaccaggaccagaacaatttctcctggcctgttacgatgtgccctctgcctcctcggagcctccccgcagggctcaggtatgagtggtgcggaagcagcctgcatctcatggcactgtgggccactttctccttcgggaagcacagtctgccctgacttctgtcacatgccgctccctgttttccttctccttacctgcttacattcttttagcctcttttgcttgacccatgaagtggctatgtccttaggctctgtctttctcaaggccctcttattgaatgaccttgctcactccacaccttcagtcattccctctccaggctcggtctctcccaagtgcccatttttctggacatctcttttcaagcctctggatgcctggcaggctccttgtgtgcaagagaaaagccttggtcctgaagcaaaatacctggctccacattcactcagtgaacccgtgggtcaatcctcaccactctctgagcctcgaagtttccttctgagaaaaaggacatcttttcattcaatccccacaggtttgttgggaggttctaggaagactgtggattgacagctgtttgcaaacttaaaacatggctccaaaggagggacagcactctgtgctccatagacagtgcacacaagtccccaagtgggccatcctcttccggcctccccctaccatttgcccagacctcctgtctccagggcaaccctaccagtcccccataccagatactggagcctcgttttgcctcctcctctcccccatccccactttgggatccaccagcaacaacgttggttctgcctactcggtatctctttccactgtcccctcctccccctcctacactccaggtcccattagctctcccccagacagtttcagtggcctcctttctggtgtccctggcttccttctgtttggaaaaagcctctactctcctaggcttcagatgtgacagttgcctctaaatccaagatttggattagtggggtcaacaagatgggctgcttgagtggggtcaccagaggatgcacgggttgatggttgaccagacgttcactggtgaggcctgtttatgagatgctttgagtgggatccactagatgctgaagcaggcaggatttggttgtccctctacttgggtgaaggtgtcagatacccaggtgaggtcaggcccagagctgacttgagggagctgaggccagaaaggggctaagacgcatctgtccacatccctccatttctccctctccacccaagggtccttgaattcccagccacagccccctccctcaccccactttgtatgggtctctggggcaattccagaaagtcgtcttctgcccacttcagcataacctgggactttatcccggctccaccacttactcccttggaaaaatgcatttacttacttgggcttcagtttcctctctgaaaaacggggcttttaaatcctcctagctgaggtattgggagaatcagttgaaagtccctccgaagactttggtgctatgcgcaggaaatacatgggccaggggtcactttctctctatccttccacccctcccacttgccccacactctgagcatttgaagggagaagaccttgtcttgttcctgagacactcctcctaccccatgcctggcccaggggtgcccagaaatgttttctgaattgaatcaacgaagggagagggtgttgggaaacaagcagggccctggccaggacatttagacctggggtagggacaggactgtccctcacagtcccaaacacaccttttcatcctgtcaatgaattttggctttcaagtcctacagacctgggttcgaatcctggcccagctccgaggcctggcacaaacgatctcaagtctgcaagcctcagctcctcgtctgcaaaggctgtggagcgatctccagctcacaggggtgctgacacacagtaggtgctcaggaaatggcacccagcccatattcctccttcccttcctccttttcgcctttcctttcttccatgtgagagatgtctccaaggaaacaggaggaattatttaaagaaaagagccgaggactcgggtgggagcggatggtggctcgggcatctggaaggcagaggcaggctgcactggcccttcaaggagacaatgggacccaggtgcctcctcatctcagacagcactaggcagggcctatggcaaatctatgttgaggggcagtggaaaaatgctcctggcaccaaagagcaggaacagagcaatggaccctgctctgcatttgccttacttggtggccctgaaaaagtcccagccctccagccttgtggcctgggggtgaatgggaggtactactgcaagggaggtgggcagggagaaggtgaattggggctggtgagttccgggcttagaagagtaaaagtgaaggtctcagggtgctcctgagctgggcagaaattcattcattcattcattcattcattcattcattcactcatttattcattcgttcaactcatatctactgaactgaacaccttcctcctctctgccaggcaatgagcacacctcatttcacgttttcctcagaatatccttgttatgagatttttgcccccactgtgcagatgaagaaactgaggctctgagaggcgaaatgaatcacccaagtccacaaagtcaaagattcaagcagggcacggtagcgtgcacctgtaatcccagctactggggaggctgaggtgggaggatcacttgagcccaggagtttgaggctgcattgagccatgatcatgccactgcactccagcctgggctgcagagccagaccccatctccaaaaaaaaaaaaatcaacagttctttcccagccttgtcctcattttctatagatcactatcaccttcaataaaaagtcctgatgccttgagaggacctcacggtcatgatgatccagcccctgccaacctttctggcttcacctttgagctctccaggcttccgtctcagtgagctgccagtagtggctcagatgtgccccagcctggcctccaggtctctgagcatgtccttacgctgcaacgtcccctctgtcttccccttgctcttcaggctaagtcctgcacagcttaggggtcacctcttcctgtaacccttctgaccctctcccaaggctcagtcagtgccctccaggagtggtgggttttcttgtgtctcctccgtgggcagcaagccccttgaggccagtgacattcctcatgcaactctgcatccctggtacccaggaggggctggacctgggtgggtatcagtgggcaccaagtgagtgaatgaatggatgagataaggtacagtgtgaaattgctactcctagcctcaatcattttgttctctaaacatttcccaggcacctcctccatgccaggcctgatgccagccccggggaagacgataactcagccttgcaattcactttgtggttcacaacgtgcttccattataacagtcccagccaccctgcaaagtagatgtttgtgttgttttgggctgtgtccattttttgaatgtggaaactgagacccagtgaggttgggtaacttgcccagtcacagccagtgtgtgacagagccaagatatgaatccaggcctgttcactccagagcccacactcccccacaccgggaaaacaaatcaaaatagagcaaaggaatacatgacacttagaaatttattttggaacaaatttggacaatatagaaaatttggaaaatataggagaggagaaaaaaggaggtaattctgcatagctcccctcccctgggatacatgtcattaagtgtcattaaaagtttgagaatcttctgcttgttttggctgagcctggccaagttcatatgatgcaagcagcacacggtatgaacccagactgtcaaatgctgcctttttaaatttttttgaggcagggtctccctcagtcacccaggctagagtgcagtggtacaaacacggctcactgcagccttgacctcctaggctcaagtgattctcccacctcagcctcccaagtagctgggactacaggcatgctccaccacacccagctaactttttaattttgtagggatggggtctcgccatgttgcccaggctggccctggactcctggcctcaagcagtcctcctgcctcagcctcccaaaacactgggattacaggtataactgtgcaggtctcaaataccatgctttgatattaatttaatgtggcctgaaccccaaggagctacttccagtcttgtgggagaggaggaagtaacaggtgtgcctaagcgggggttccccctaagtggaccctgaaacaggcacttgagtgcaggtagtttatctgagaggtgatcctagtctgcaggagggaggcagaggaggagggaaagtcagtcagatgggcatttgccagcagggcaccactgtgggccactggagctccatcttgctggggacgttctgaagaacagtggaaagcgtgcctgagactgtctccctgaaggctcggaggctgcagcatttcctctgtgactcttttccccaagggactgaaggttctgctgggggccttactctcctgcatttccaagccgtcctgtgcttggatgggacaagctcttgcaacttcagaaaatgccatcaggcagaaaagtggagagacctggtgggtgcttgcagcagaccagagttcaggagctgtccaccaaggctgcagcagaattcaagatgggcaccaacagcatttgctttgagacgtggtgtgtctttgtcatcataaagtgttttgggggtataaaaccaggaatgagacatagaatgagacatagaagtcaggggtgatttccccagaataggtgacattcgagttgaattttgaaaggtgactacacaatgggagaagaggcatttcaggtaaaggctgaggtgtgaaacagcttgttgtcttcaggagaaactgcagagcttgtacctgagtcatggggtttggccaagactggtttggtacaagctcaatgtcatcattagctagatatggtcattatccggatttaatcattatcaaattacagacctggtttatattccactttcactgcatctctgtggacctctccatctctttttctgtctttgtctctatgagtttctctctctctttttaaaaatacatacttcagatacacacaagtgagttaaactgagtccttggttcatgacatgccttcagcattggtgcatcaagtcctacagtgtatataatacaagatagtagaaagcataatctaacatatgcaccttgagccactgctcaccccaagaactagaacagaatcagtatctgacatctgcctctgtgctgcaccccatcccatcccccagctctctgctggaggtcactaagattctgaattttgagtttatcctcccctagtttccttgtttttagtgttattacatgcatgcatacctaattaatatgtagtttgtttttacttgtttattaattttatgttaaaaagtgccatactgtatatagtcttgtcttttctttttagctcaatgctgttgatgagcatgtggccatgttgctgtatgtaatcatgatttatttgttctgaaggctgtatgtgactataccattatttatttctttttttattctcccgtcgatggacagtcaggctgtcttctggtcttctgctattgcaaacagtgctgtgtggctgttcctgcgcgtaaatcctaaagctctgcaaaatgcagtctgggcatcctcagcccgggcatcacctggaaacttgttagaaatgcagagtctggggccctgccctagccccgccagaactgaatctgcattttaacaagacccctgggggattcactggcttattcacgtttgagaagcactggccgagtgtacctctgcatgggtttctcttgggcatacacatcaggagtggaagtgctgggtcgcagtgggtggcccagatcaccctctcggccgcagcttcggagctgccactgagctagagcttccccagctcttggtattgtcccacgttctcattgttgccagtcgactgggcgtgcagtggcatctcatcatggtcttgacttacatttcccccatgactaacgaggtcaggcacctcctcgtatgtttactggccatatgtttccccttctgtgaaacgcctgttcctgttttttgctcttttttcttttaggctcactctactcaatcctgcctttgcatatactgttctttccatcagaaatgccttcccctttcgctaccctgtgtcagttcttccaggaagccctctctgattgctgcttaggttgtgagcctcctcagcctcacaggcaggaaaactcggtgtcattgtcccttcattcttctcctgaagtctcttcctcactggagagactgtgaacctatatggcttggtttgcatagagttaacaattttttcactctagttgccattattttcagggattttctgaagttttacatttcagaaaatcttaactgctagcttctcttgaaaaaataagatatggctccactgtctccttccctagatggcaaaatcagctagtgctgagtaggggctgcccctgctggaccatgtgtcacagtccccacaactccaggctcacaacttgcttaaacaacctgtccaagccctgtgggcatttgggtttgtgacccttgcctaagcgtgcccaatgcttgttcctctaaaacttgcccttccttcccctcctccccataaccccatccttgttcccactcagggctttgcatctctcccctgtgccatcacactagcctccttgacattcctttctctagtcttgcctgttccagtccactgccatgtcacactcctgctcaagaaccagcaatggcacccccttgccttcccaggcaccacctgactttctacaaaacaaaaaagtattacaataggaatattttatgtccacaaaaaagtctagagaacaacatgacaaacacccatgtgctcaccaccccggcttaagacataaaccacttcaagtatatttaaagcccttactacaacattcccttccctctctccctcacggtcactactctcttgaatttgctgtctatcactcccatgcatgcttttacacttgtattacatatgtatgtgtcgctaaacaatatatggtattgtgttgtgtgttttcaaactttatgtatctggcatgaaattatgttttccatctgcaacttgctttttccatccaacaatatatatttttattttaaaaattgtattgaagtatagcattcatacaaagagcacacaaattgtaagtgtacaaccctggattttcacaaactgaatcaacagtgtgtttttgagattcagcctcacaatgcataagcttgcaatcacctattttgaggattgtggatcacagacagttttccattgtctgaatgtgttgctatttatccagtttccaaatgatggacatttaggctgtgtccagcttttcactattacaaacgatgctgctatgagcatccttgtgcaagcctcccgggcccccatgtgaggtgttctcgagggcaaagcctgctcatcttcaacctgatcatatatataccgccaggtcgctgtccagcccctggctctcgctggctcccagctcattcgccaagatcttcccactgctccagggagcccactctcctccttgctgacaccctgcccaaacatgccacctctttgcctgctgcatgcaggtgttaaactcacctttccatccaggctttactgaagccctgcctcttccaggaagccctcttgggcagcgctgggcctcagggtgtcatctcctctgagtgacctcctctcaccccagttgttagagccagagaagatagagacaaacccagaccagacactggggaaaggggaatgtgttctggagaaaggaaatatgggtagactagtagggagtgtgagaagctggggtacgaaacagattgctctgggccttgatggatgagtaggagtttgtcaggtagagaggtgggagggcatggcaggcacagggaaaggcagaggctgggcactgaaacagtcatcactgggttggggatgtgagcagggtgggtgggtggtggaggagactggaacagggctgtgaggagccttgcaggccaccctttcacgccattctgacccttctgcattcagaggcattctctggagatggctgtgtgtgggagccagagaaggcaggcacattcatttgacacctactgaatgccaggcaccggtaaagagctcatacccatgatctctttggtttctcacccaagttggggatagagactcgtggtgtccccattttacaggtggaggaatggggctcagagagggacagtcttttgtctgtaaccacagagccaggagaggcagggctggtacgcagttcaggttcatcccactccagagactgcatttaacccccgttcagccagaggctagaagacacctgggagagggttctgcggaagcaggtcaccgggagggggcacccattcctagaggcaggagccccaagttctcgggggtggggtggttcctgactggcgcggtgtgacccgggccagtctcgttctctctgggcctcagtttccctcctccacggggcggcgatggtcaacacaggttcctgccggcccgccccgtagcctggggttccaggctcccgtgccaccgcggcccgcgctgtgtgaccttgttccagtagcctgccctctctggactggcggccccggatttccaagcgctcttccggatcgcgacagagcggtcgcccgctgcggagaccctcccccttcccccgggttgcgggggcgtgggtgggggtggggcgccaggaacggcgcgggcccccccaaggcccccccagccccgcgcccgcggcccgatccgcgcctggttttgggcgcagccgcacggccccctcccccgcgctcctctcccctctccccgccccctccccgccgctctcggggagccggggccgcacggctcctcctcccgcagccgcatctggggcgccgcgccggccggaggagaggcatggggcgcccgcgggccggagccggggcgggggccggggcctaggcgcgcggacctgcgagcggacccgagaggcggcggcggcgcagcggaacggcagagcgggccggaggcggccgaggcgcccggcgcaggtgagggcgcgggggtggcgcgcggcggctcctacccccttcccgggccggcgcgctccgtccctcggctagaccccccgatctggtctcctccccgacagacctccctgaaccgggggacggcgctggcgcagaaaagccccctcccctgccagttctgtcttccgatcccgggtccgaggggccggctgtgcggctgggaagcgccttctccggttgggatcgccccatccatgtctccccggaccctcaaatcgggggcggcggcaccggggcccggaacccctgtccgggaccggatccccattccggctctttttcccgcggactcccccgtaccccatatcaagcggctgccaaagcctggaagccccctcctcaggcccgccccctaatccgcagggcggcctgggggtcaggcggacccctcccgtgcccggccaaccttggcgcttgggagagcagggctatgccggcccgggcattcctccattcaacccagctgcctcggatcccgtctcggtagacccgggagccgccggctccccccttcccgagctctttccctgacctggcatctggggagggggcgggggcagcacccccctcccgcgctgcatagcgccccctccctgtttgcgtccctgggaggggctgggctgacccgggcacctgggctgggggggcactcacatggctaccggaggcccccacgtgcggcgccccgcggagacaggggttcgcgttcagagctggtggcggatggaccaggtggccgcggggaccagctgggtccagatgtgctgggcctgctggaaggggacaggtgctacctggacgtgtaatggcccttggtctcttttggccgaacctgccgctccgatccccctccatcccttcatccctccatccctccatccctccatccctccggcccttctccccttcttcctccgctgcctgtgttgcagagaggggctgtcagagactgttgatgtgggaaaaaatgaaatgggggaggggttgtgattggcaaaggccagttgtgccgggagcggtgggtagaggaggtgccctgagaatgggaagccctaagcttggagggcagcgctgatggggagagggttcctggcacccccacctgcctggaagtggaaatgacatagcgggagggggctgcagttccagcccccgggggactggcctgccctgcctctacctccactgcacctcctctccaagcctagtccccagtagggaggggggagtcctggctctctctgcctctgagccctcacttgtgggagggggctgttttccgccagctggaagtggtgggaatcagttgtacaggaccatctcctagaatgcctgttggaagagccctgtttctgtccctccttggtggccacctctctcttgccttctctgccagagggcactgggctgcctggtcccagggtggggctgcagagctggtgccctggcctggccgatgggtggctggagtgttggagccaccaccaggccctagagccggctgtcggggccagtcagcagcagactccgagtgtgttcccagcagctccggagacgctggctgtgcacgtggggctggctagagtgcctgtctcccgctgtggcaggggtaggccagggatcctgtgtcctccaggagctgggacagcgcaactcaacttctgggagtgtgcccgtgtgtggtgtccatggcgaccccgtactcacctgccagaggcctggtgaggcctgtgctgggcgctggggagtgcaatggctgacagggtccccacctccaggagcctcttttttgttgggggaggcagcctgtgtcaggcattggagacagtgtccatgctgaagagaaactgtgagctggacgggacctgatggctgggttatgtggaaccccgggtgccagccttgagatggaactgcaggtctgagggctgtgccccgggcgtgaagctgcctggcagctgagttggtgtttttgaaggaaggctgtgcagcacttgggaactaggagagaatgtgtgctttggagctttcgggagacgctgacgtatcggatgtatcggggcacccactgacatctcattaggttcttgtgtggtttgtgagccacaggcttcgtaaatgccagcagtttcacatgatggggaggctctgaggaactgtatcccgggcaccgtatgtgacagaagcaggtggtccctaccctcctatacttccgtgatgggtattcattcattcagaaaagcattagaaaatcgcatttgctaacatcagtgcatttgaacactttcatttaaacattctgaaatgtgaattaataaaatcttgaatgcagggtttttttttatagaaagtacacagtaggtactcaataaatgtcatggctcccaggatgaaacccaacctccccctcccccaactagctactttctagccacctcttgctccccaccccctccctctttggctcgggtccccctggcgggccttcagttcctggaacaggccacgttccctccagcttcagggtcttcacacatgctggctcctctgcctgaacatccccagcccccttctcccacgtgcctgtttcactactgctcatcacccaagcttaagcatcgcttccaaaagaaagccttcctcgatgcccaggccaggctgtgtcactgtcaccacccgcccagccccgtgggcctctgcttcattaccccgtgcccatccttcttggatgtctctgggtgtggctggtgtggagaagggcagggtcgtgcctgtctcttcacgccattcctctggtgctgagaagatgtcttggctcaacgtgtgcactcatccatttcttttgacttttgacgacctggtccattctgagtggagggctgggctctggggaatggggggagacttggccaggccattgccaacatgactgtccatgtgcgttcctggcctccagctgggtctgcatacccagaggcatttagccaggatctgtgggagttacaggcctgtagcccctaaagtcccagcaggtctgtgggaccccaaagtctctacaagagggagaggggccatgctggggcagacctggcatctttagaggtgtgcccctggccaggcatttccccctgtggccattcatttgctcacatcatcacctgtttacctgttcagcccttccttcactcgccaggtcactggcctgttcactcttccatttcctagtcctctgtccgttctttgggctactagtgcttcctgaggcccactcagtgtccagccctgtgccaggcttggggacacagagtcaaacctgtgaggaccccactctgtaaactgtagccatcctgccaggtgcttcctagtgatggagactggtgctgtccaaccactggaagtgcttcataaaggacatgcgctgagcagggttttggaggatttggggatttgggtagatggagaatagtggggaaggacactgctggctgcaagaactgcatggacaagcacagtggcccatgcttgtaatcccagcactttgggaggccaaggtgggaggattccttgagtccaggagtttgagactagtctaggcaacatagtgagaccctgtctctacaaaaaaaaaaaaagaaagaaagaaagaaagaaagaaagaaagaaagaaagaaagaaagaaagaaagaaagaaaagaaaagaattgcatggataaaggcaggaaggcagccacatgctggttgagcttggggatgctgagggttatgtgtccttctaagaggaggtggccactcctgagtgggccacagggaggctggtggtggagggagtagggtgcagtcatggtcggcatccactcttctaggagccctgttgcgaatttgctgtgtttctttggatgaggcgtgtcccctctctgggctcccttgataaagtgaagacttggacctgatgatctctgagggaccttctgccttccactgtccgaagtctgtgatcctgggagccctgcatcttggggcatctggtgggctgtcctcccattttctggacaaggaaactgagcattagtttagtttattagtaaggtctccaaggctgcacagctggtgaggtggaggtgccagggtttggatccagagcaagccactgggtttgctgtagtggctttgaaggacagcttttgtgtgtaagctcccagggctggcatcagcgtggggctggcgaggcttggcagtttcttctaacagatgaccctgttggttaagggagtgagggtgctggagagcaaactcactgggcatctttgagaaaagctgtcaccgaggagtcctgtgtgttgcaccaaagacaagcccacttcctactttatcggaatatggggggatgctttgtgactcacatgactagattttctttcattgtgacctatgggggagagggttgcctgttctgttcctatatcccctccacagcgtctcctggcaactcctccaggccaggactgaagcctttaggggtgtgcagcacgtgcagtactctacagtttgcagaacccatttcatccccccatcttctagccacagccagggttaggaatgaaaagggatattgtctgcatttgacagatgaggaaactgaggctcagagtggttgggtggctgcccaaggtcactcggagggtggggggggtggaccctcagccgaggcgcccctctcactgggtccttgcagggagggcagcgtttaggggcttctcacttgcagatcacacattatttcctgagccgaggagtggggcccaggatccttctgtgctgggtttcgcaacgccgcctcctccctaccgagctgtctgacgtggccttttcaaaaacccaaaatgaatggaagcacattttgtttggagaattttgctacacccctcaccagggctggttgcaaaaccaggcttggggatccctactgatgttgacgatgataataataataataactgtatcactggctagcatttcttttcattcattcattccttcaacaaagcattttagaccatctcccaggccatgtgcactgctcagccctctgttagtgagcaccgatgtccggactctctttcagcctccctcacaccctattatgattatcacccccattttatggaagaggaaactggggcacagagagccaatgctgcacagccggtgaagtggaggtgccagggtttggacgaaaggctccctccccatgacagaggctggaagacagaggccgggctttggacgtaagtcagttagagtttagaggctggtcttagccccatgttctggggattctgaagttcccgtttgttccacagcaagcgttgggtggggagggaatcaagtggagcagacccagttcctggctttggggaacctgaacagatgcgctgggggcagagctgggtctggtctggagagcagccttgggaccacccttggactcagtggctgctctgctgtcagtggccacacctcccccagccccgccagaggccccatctgaactgtgaggttcacgggtaccaagggatgggcatcagaggagaactgtggcctctctcccggctccgctgtgcttccccagcatgcaattctggttaagccagctcatctctcaggcttctcacggggcacgtggagtgatatggagtgaccatgaccggcagtccattggtgaggaagaacaagatatttggctcctgggaccgttcatggaaaaggtagagccctcaatatgcacatgcacacgcacacacacacatgcacgcgcgaacacacgcacacacacacacacacacacacacagtgcagccgccccccggctgcagtcacatttgcgctcctcttaggtgagagaagggctgcgcaggtcacccacctctgggagtctgcttcaaaagtggctaatggaacatttggtgcatgagggggtcatctttagaaagcataagatgtgggcaggttctgtctttgatgatgtggaaatggggcaggcatcctggtgtttaaatggagcaaaagacttattgaggcacttatggagcgcctgctgtgtacctagcactgcactgggactcaagatgggggattagaacaacgccctgaagaggtgctgtgctggtgggggcagtgggactctgcaccccgggtgctgggctaggagtgagcactcggcctctgggttcaggtgtttttcttcctgcagtgacagataagcctgcgggggcagacagaggtgggtccgggaggctttctgttgcagctgccaggacatgggtgctgggtatctgggggtttgtagtaagaggaacgagcaggtttgctactgctgtgtgtccctaactgattgcctgcacctctctgggcctccatctacttggtgggagtagaggtgggagtttggtttctgagtctttcccggcttagccttctgtgacttcagggatgaaacgagctgggcttccctctgagcggtgtcagggagtcctcactgccctcacccctgacctgccgcctggcttctccactgccctctatcttccagctcctgtcatggggagggagcctttccttcccccactgcaggctgactgcgtgcagtgacgcagcacccgaggactctggagtgcagcttgtaaacgggaatctgggtttgctagagacagggggaaaggttcttcccaccacccccagctgcctgcctgcctttctccctccgtggctgccactaagccctggcacctcctcagctctgccagatccactcagggagtgggaggctcaggactggaggttcagctgaacagggcccaagttggagtctcagcatgccaaggccttgctgtgtgaccctggcatgcttgcctgccttttctgaacagtgtgtactgtgagggctgggctgtgagattctggggctgaccaggcagctttgcagtgacagctctggggtgggggggggtcacctgcaattggagaggagctcctggctggacttggcctgctgctgggggggcagggccgtggtccagagactgctgggttggagatagagtcagggctctctgccgcctgtgttttccatgggcacaccctgcagctgagggagcaaggtgctgtggtcatccgttttaacatctggggaaactgaggctgcacagctggtgggtagtagagctaggatttgaacccaggtgtgtgtgattcatgcacccaggtgagaaggtagaccccaggcaagaggccagctgggcaactgtgcacctccctgtgccctctctgggtctcagttaccccatcggaacagcaagagtcaggaggtgatgttggggttgccttacccttctctgagccccacctggtactgctggaattttctgagcttccccacctgacctacagctcctatcctcaaagtgagtgtggcggcaggtgaaggggtgtcggcatctgacacttcctcagggacctgccacctcggggtgtgagggattcctggaggactgggagtgcacaaggccttccagggacagcgtgctgggagcagaagcgcgtgcagaggcgggtggctctgggcggcctgggggtgtcgactagacctggggccaggcccacctctgcccatctatgcatccaaccctcatagatctggttcacaggggactctgggagagtgcaggcggggacaaggagggagggctggcctcggggtccttcccactccctgtgtgtgtgcgtgtgtgtgtgtgtgtgtgtgtggtgtggtgtgtgtgtggnnnnnnnnnnnnnnnnnnnnnnnnnnnnnnnnnnnnnnnnnnnnnnnnnnnnnnnnnnnnnnnnnnnnnnnnnnnnnnnnnnnnnnnnnnnnnnnnnnnnnnnnnnnnnnnnnnnnnnnnnnnnnnnnnnnnnnnnnnnnnnnnnnnnnnnnnnnnnnnnnnnnnnnnnnnnnnnnnnnnnnnnnnnnnnnnnnnnnnnnnnnnnnnnnnnnnnnnnnnnnnnnnnnnnnnnnnnnnnnnnnnnnnnnnnnnnnnnnnnnnnnnnnnnnnnnnnnnnnnnnnnnnnnnnnnnnnnnnnnnnnnnnnnnnnnnnnnnnnnnnnnnnnnnnnnnnnnnnnnnnnnnnnnntgtgtggtattatgtgtatggagtgggtgtgtggtgtgatgtgtgtggggtgggtgtgtggtgtgatgtgtgtgtggtgtggatgtgtagtgtgtggtgtatgttatgtatggtgtctggtgtgtgtgctatgatgtgtgtgatgtgggtatgtggtgtgtgtggtgtgtgatgtgtggtgtgtgatgtgtggtgtgatgcgtatgtggtgtgtgtgtgctgtgtgtgatgtgtgtttgtggtgtgttatctatggtgtgtggtgtgtgtgttatgtatggtgtgtgtggtgcgtgtgtggtggtgtgagatgtgtgtgtggtgtgttgcgcccccccgtgtgtggtgtgatgtgtgtgttatgtatggtgtgtgtgatgtgtggtgtgtgatgtgtggtatgtggtgtggtgtgtgtgatgtgtggtgtgtgtgctgtgatgtgtgtgtggtgtctgtgatgtgtgtgtatgctgtgtggtgtgtgtttgtgtgcgttgtgttacatcacctcccagatgaatataaactcacatgagtgacaggcactgtgacccaggagagctaagaggagaccgtagctgtcttggtgtccaggagctgagacctgagagtgaggaggggtgtggtgcggtgcggggacagcacggagagccatgggtcacgggcctggagagagcagccaggagcttgggatgaggaacagtcaaggctggctgcgtgggcttcatgggaccacgtggactggtgacaggaggaaactgaggcttggagccatgaagcagcctgcctaggcaggactggaaacttgggtggccatggttgggtccctggggttgctggatggtctgccctggccgcagctagcaaagccagtggccatcactgagtccaactcaggacatttgagcaacattcctgaggccctgcagcaagtaagagtggggctgggcctccccttcccagcctctcagcctcctcttgtgtgggtgcatcccactgaaagaaactaggcagccacagaaggttccagagcagggcagacctacaatgctctcctggccgaccactccccaagccttcccggcactggcatggggtgttggctgcctgcccactgctgaggctaaggccagagctgactgacccctgccatctcagtctgtggcctcactctgctgacactggccgggcagagacaaaggcagtgggcagcctgggagggggtggtgtggcccaccagccctgtggctttcaggaaccatttgcaagactgggtttgataatgacaaggctggtcctggaggccagcgggaaggcagcctctcatcctgagcccttgagatgcgtctgggggatcaatcacaaagcggaaggtgggctccttccccattgacctccccttctcaagcatcttttggcaacagccttcatggcctctggccaaggtgaccatccccgcctcctacctgatttcctgctggtgcgtcctccacgcaggttaagtaaccacatccagctgctcatggcccagagccctgaatgaggccattgctgcccctgtcacctgcctctgtgcaccttccacagccccctcctgctttgcccccatcacaccccacccgcagctcacctgaatgactgggcatgcccagaaccttccatgtcctctggctttcctgcctttgcgtttactgttccctttccctggaaatccttccccacagtctttgcttggtaactctgatttgttacttatggctcagctcagacctcccctttccaggaaccctgcctttcccaaccacatgggtcaccctacccccacagcggactagactgtaagggtctcccaccgggcagaggctggggcctggcacacagcaggggcacagcttgtgagtgttacctgagcattgttgagcctggtagtccaggaagggcctgagaacaggtgggggtggaaaggcagcccagctcaccagcccgtccccttcagcagtgctcccaagcaccccctcacagagaagctgggtcacccaggggtgccttggacagcagcccaggccagcccgtcccattgcagcccgtcactcctctcctccccagcctcttctctgggggccacctcctcacctggatctggcactaagggggtaactgaggctgggcaaacagggagctggttgaccggctgcctgtttggcttgcacacctaccaggactggcttttcaaactgggagaagctcagctgtttgaaaatctttctccaggataggaataaacttcttgttctttaagcctctgaaattttagagtctatttattactgtagcctagtctacactaatatgaatatctgttatgtgccagagactattctaggcactagggataataatgttaacctccaaggaagctactatgaaaattttcttcctttctctccttccttcctttcttttccttccttccttccctccttccttccttcctctccttttttctttctttctttctttctttctttctttctttctttctttctttctttcttatctttctttctttcttatctttctttcttccttccttccttccttccttcctctttctctctttctttccttctctctttctttctttcattctttctttcctctcgtctctttctttctctcttcttccttccttctttcttttcttttcttctttcttttctcctttcttttccttctctttctttttttttttttttgtcagagctctgttgcccaggccggagtacagtgacatgatcatagctcactgcagccttgaacttctgggatcgaacaatcttcctgcctcagcctctggagtagccaggattacagttgcacatcaccatgcccagctaattaaaaaaaaaaaaaatttagagatggggtcttgctatgttgcccaggctggtcttgaactcttggcctcaagcaatccttctctccagcctccccagttgctggttttgtgggcgtgagccaccgagcccagcactcttgtgagaattttctgaaaactgacaggtgagcatctctagctgggtgctgcacatagctgagtcagatccattcttgagtccagcacagtcataaagagcagccacacagggctggctgaggttggcagggatggtcttctggacagatcagggccactaaagaaaagagccctgggtgtgcccagcctgggagcatggcccagcacagcctctgaagccggccctggttctctccagcctctattctaccctgaatcaaggctcatcttctatactcactacttattactgtggaacaaattaccccaacatttagcagcttaaagcagtaataaatgtgtcctctcacacacacacacacacacacacacacacacacacacacacacacacacacagtctactccaggagtgactttgagggcatccagtttaccctcatgatgatcaggttaggcagagtgataagggctgtttctgggtaggtcctgggtcacagcctgacaccagctgtctctccaacatgccctggggctctaagcagaaggggccactgtcctcacaggagcggaggcaaggcatagagaggaagagtgacactcctgaggtcacccatccggcagctggtggacccaggattgtctccctgtctcccaggctgaaatgcagtggtgcagtcatggctcactgcagcctcccactcctgggcacaagtgttcctccccactcagcctcccgagtagctgggactacaggggtgcaccactggacctggctaattttttaaattttttgtaaagataggatctcgctttgctgcccaggctggtcttgaactcctggcttcaagtgatcctcccacctcaacctctcaaagtgctgggattacaggtgtggaccactgcacccagccctggcccaggatcttaaccactgcaccctcctgccttgggtgagacagacgagggcagggaggctctggctgggtggggtcttcatgcctgtctggaaatgaggtgttcatagcagtgattgttgatgactagctgttctaatgagcaggttttttctgattttgtttttcattacaagagcaaaactgaaggcaggcgcggtggctcacgcctgtaatcttagcactttgggaggccaaggcgggaggatcatgaggtcaagagatggagaccatcctgaccaacgaggtgaaaccctgtctctactaaaaatacaaaaattagctggcatggtggtgcacgcctgtagtcctggctactcaggaggctgaggcaggagaatcgcttgaacctgggaggtggaggttgcagcaagttgagattgtgccactgcactccagcctggcaacagagcgagactccatctcaaaaaaagaaaaaaaaaaaaagaaaaactgattggaaaggtgggcatctgtctcaggcccggagggagggagctgctgattttgaggggtggcccaagtttgagtccccactctgctcactggctatgtgattttgagcaggtcacagaaacctctctcagcctcagtttcccccgctgtcctcagagagataacagtgtcattgcctgtctcagaggcttggtttgagggtgaattgaggtcctgtgtgttcaaggactgaggacagagcctggcatacagcaagtccccaaaataaggcagctggtgttactgtgctctctcctgacacccgcacaccccccggaaccttctggcactccctccctagcctagcccagggcagctcacagaagggccagcctgggaaagtgggccaagggtgagcactatgggcagagccctgcacagagggcacagtgcttgtccccatctcacagaggtgggaaaccggggccacagatgactggtccaaagacctcaggggtggagcggggactggatcacagcctcgtgactcacagtccagtgcctttcttgctgcccaactccttagggattcttgggagaacttcaaggagctaaagagaattctaggggcccccagggcacctaggaggcctgggaggcaggtgcttgggccctcctcccctcaccaccccaggcctctgtgtgaccctgttggagttgcctccttctctgtgcctctgtcacagcaaggtagcggggagagtctggaatctgaagaacttggattcaaggccccctcccccgggcctccctctgcgtcccactcccccgggcctccctctgtgtccctctcctccaggcctccctctgtgtccccctctcccaggcctccctctgtgtccctctcctccaggcctccctctgtgtccgcctcctccaggcctccctctgtgtcgcattcccctaggcccccctctgtgtcttcctctcccaggcccccctctgtgtctttctctcccaggcccccctctgtgcccctctcccccgggcctccctctgtgtccccctcctccaggcccccctctgtgtctccctctcccaggcctccctttatcccctcctctaagccctcctctgtgtcccccttccccagccccaccccgtgtcccctccctcctctgctgtcctggtttgtgcctggccgacattcaaggtggcagctttggggtgggagctcaggcaatgggaaccatgcttggaggggcccagccaggcccacactgacccttgccctggtggactccctctgccagggcaggtggcagtggggctgtggggctgtgagtgggggctctggttctccccacgctgcaggcctgcgtcatgccccccactcccttgctgcatgccctgcattggaaagcagatatatttagacgaaatgctgtgttccagacagattctgcatccactgtacttgtcagggctgggggaggcagggcctgtgagcagccacacctggtacctggagtctgggcccccctgagccctttgcccacctgcctgggacctctgggggctgctgactgggtgagggggacactgatgagacagaggcctggccctctaccgactttggacgggtctccctctgcaccctctctgccgcctaaggccacatctctctaactctttacctccaagtcacagccaaatcagtccttggctccctgtctgcccccagcttcctctgaatccccgaaccctcctgtaccccttccaggactcagcactttgtcccctgtgtagtcagtcagcaaacgaggatttgagcctgctgcgggccaggtccttgctggatgtaggacctggagatgaaggccctcaaaggagccacatcacagtctaggagcgggatcatagaccacaaagacaacagcaggtacccgcatggcagcaggaagccctagggcaagggcacccatgctggggtgatggtcagggaaggcttctcggaggagggagtggtccaagctgacacccgttggttaagtgagagtgagcccacacctggagacgaaacaggcattcctggcagagggaacagcacgtgcaaagggctggggttgagggaagacctggctgcacatgggagaatagggagcaagaagacgggcagggatggggtctttcagagcctcaagtgccaggctgagggcctcggctgccccatgggccctggagggctgcgggggagtttccagcaaggcagtggccaggtctgatgtgagcatagctggggcagctggtcattggttccacagccactcgccaggctggccccggcttccacctcggatgtgctctgcccagcctggtgggaatcagaaatagctcacacgtgctcagcgcctggtgaggcgctcgcccgcctcagcgcgtttcatctgcgcccgagtctaggagggctcagtgcttgtgagctgggtgaccttctcactcctacttattaatatgccacccactggggctgtaggcagagttgggagaacgagcatggggagggagcgaggagggggaaaggtgggggtcccagggtgggaaatgctgagggcttggaaatggtacctgcccaccagaacaatatgcagcagataaaacccaaagtatagagacaaatatacagatccccctcgatctacctgcagtggtgaccacattttgatgccgaccttccagaggtttctccaagtctgtctgctgtggcagatagattcattcattcattcaacaaatatttgttgagtgcccacttgatgccagaccctgtggtgggcagaggggacatggctctgagtgaaagggactctcctggcccttagggaactcaaaaagcaggtaaaacagtgatgaggcccacggaggagggtcacaggaacatgggccctgactggagtcacaaaggcttcctggaggaggtgacacttgaactgagacctaagggatgaggagaagttgccccagcaaagaggagcagaagaaaacattccagcagagggaactgcaaatgtgcaaaccccggggtgtgaggaaggtggggttttcagggaagaggaaggaagatggtgaggctggagtgttgggatgtggagggaggacaggtgaagcactagaggatggcgggggccagacggtatggggccttctgcactgtggtcagggtttggggatttacataagagcgtgggttgtggcgccagaaggtctagatgcaaatccagctctgctgcttattaggggcttgacttcagcaagttacctaacttctctgtgcctcagtcccctcatctgtaaagtaggggcagtgatggtccctgcctcataagactgttgtgaggatgaagtgaggtaataaagtgcgtaggacagcacgtggcacacagcaagtgcttataaatggtagctcatataatgtcacagtcatctgtagatggagggcatctgtgcagatgactttgcaatagggtcacattagtcctgctcatctgcagctacttcttcccttgatgctggccatcctcctgagtcagtgactaccgagtattattctatttgaaatttctgagttgtagtatagcacgtgttgtagagtgtactaatcttaagcagatagtatagcttgatatatgtgtatatctcacccttgtaactaccactaaggtcaagatgcaggatatttccaggccaggtgcagtggctcacgcctgtaatcccaacactttgggaggttgaggagggtggattgcttgagcccaggagttcgagaccagcctgggcaacatggtgaaaccccatctctacaaaagatacaaacactagctgggcatggtggtgtgtgcctgtggtcccagctactcaggaggaggctgaggtgggaggatcgcttgagcctgggaggttgaggctgcagtgagccatgttctcaccactgcactcagcctggagtgacacagagaccctatctcaaaaaaaaaaaaaaaaaaaaaaaaaaaagatataggatatctccagctataccaaaaggctctgtcttgccttttccaattaattccccacctcccttccccaggggcaaccaatattctgactcctaaagccatagctttgttttgtctttttcacaccttcacataaacaacatcatgcagattgtctcttttgtgctaacttcttttgctcctcactttgtcaatgagattcatcatggctgttgtgtgtattggtaagttttcttttatattgctgcctagtattccacttagcgaatatgtcatacgttatccattctattgttgatagacttttggaatatttctagtttttgactatatggatagtgctgctttgagctttctcatagaagtcttttgggaaacttttgcggttatttctgttggttatataccgagtggagtttatttattctgtgggttgtctcttcacttttttgatagtgccttacagcagggatccccaacctttttggcaccagggactggtttcatggaagacaagttttgggatgaaactgtttcacctcagatcatcaggcattagttagattcccataaggggcatgtaacctagatcccccgcatgcgtagttcacagtaggattcgtactcctgtgagaatctaatgccaccgctgatctgacaggaggaggagctcaggcggtaaagctggcttgcctgctgctcacctcctgctctgcagcccagttcctaacaggccacagactggtacaggtccatggcccaggaattggggacccatgctttatagcacaaaagttttaaactttgatgaagtccaattcatctattttttttctttgggtgtattttcttttggtgtcatatctaagaaacagttgcctaattcaagggcatgaatatttatgcctgtgttttcttctaagagctttatagttcagctgggcacggtggctcatacctgtgatcccagtactttgggaggctgagatgggaggatcatttgaggtcaggagtttgaaaccagcctggccaacatggtaaaacctcacctctactaaaaatacaaaaattagctgggtgtggtggcgggcacctgtagtcccagctactagggaggcagaggcaggagaatcacttgaacccgggaggcagaggtttcagtgagccgagattgcaccactgtactccagcctggggaacagagtgagactctgtcaaaagaaaaacaaaaagagctctatagttctagctcttacatttaggtctttgatccattttgagttatttttttgtgcctggtgtgaggtaggggtcaaatttaattattttgcatgtgaacaataagttgtgctggcaccatttgttgaaaggactgttctttctccattgaatggtcttggcacccctttcgaaaatcaattaaccataaatgtgagatttgttgttgtagttgtttgtagatcctcagttctgttccattgatctatccttatgacagttccacattgacttgattattgtagctttgtaataagtttcgaaacttattatcttttaatatctgtagactctgtagtgatgtgacctgtttcattcctgatatttgtaatatgtgtctgatctttctttctcatttttaatttttgatcagactgggtacatatttttcaatggtattgatctttttgaaggacagcttttggtgtcactgattttttcttattgtttgttttctcttttattgatttgctgttctgatgctattttctttctcccacttagttcagggttaatttgtttttctttttctagttttgttttttttaaggtaaaagcagaggtcattaatcttaaagcttttgtcttcatgaatataggcatttagtgctataaagtttcctctaagtactgctttagcagcaccccacacattttgatatattatattttcatttttattcagttcatagtactttctagtttcccttttgcttccctctttgacccatgggttttttagaaatgtgttatctaatttccaaatatttgaggatttttcagggatctttctgttaattgtttttagtttaattccactgagattatataacatattttgcataactttaatcttctaaaatgtattgagacttgtttaatggcccagaatctggtccatcttggtaaatgttccatgaaaagagtatgtattctgttgttaggggatggagtgttctataaatgtcgggtcaagttggttgataattttcaaatcttctgtatccttatttattttctgttcacttgctctaccaattattgagagagagctatagacatctctgactataattggagatttgcctatttctccttacattcctatcactttttgctttatgtattttaaagctttgttattcaatacatacatatttaggatcatcattcctgttgttgcattgacctgtttatcattatgaagtgattttataatattacaaaatatactttttttttttttttgagactgagtctcgctctgttgcctgggctggagtacaatggcacgatctcggctcactgcaaacctctacctcccgggttcaagcgattctcttgactcagcctcctgagtagctgggattataggcacgcaccaccatgcctggctgatttttgtatttttagtagagacagggtttcactatgttgaccagactggtcttgaactcctgacctcaggtgatcctcccagctcggcctcccaaagtgctgggattacaggcatgagtcactgtgcctgtcctgaaacagactttttctgatgttaatgtagccctcaagattttaaaattggtgttaacatggtctatattttttcatccttttactttgtacctgttcgtgtttttatatctgaagagcatttcttgtaggcagcatatgtcaacataccaaaatttgcaggatgctgttaaagcggtactcaggggaaacccaataagttgggccccagattcaccccaggtttaaatcttttctcttgctatttgttttctatttgccctatctattctttgtttctcttttcttatttttctgctacctttagaattaatcacatttttgttattccactgtatctcttgttaattatagccataactgttttattttagtgcttgcagtatggcttacaatctacactttaaacttattgcagtgtactttcaagtgatattatatcagttcatgtatagtacatcacaatagcatacttccatctcttcgatcttgtagtattattattatgtatttgacttttatatgtgtaataagcacaacactacattgttattgtttttgtcttgatggtcattatcttttagagatatttaaataataagaaaaataatcctatatatttacccatgtagttattattttcagtgctcttcattcctttttatagattcatatttctctctggtatcattttccttcagcctgaaggattttaacattccttatagtgtgagtatgctggtgaggaattctttcagctttaatgtgtctgaaaaagtctttattttgccttcatttttttaagttatttttgctgggcatggaattataagttaacagatttttttttctgtattttaaagttgttccactgtcttctcacttgcattgtttttgacaagaaatatgctgtaatgtgtatccttgttaccagtatgtaacacatatctttcttttctggctacttttaagattttctctttttttttttttttttttttttgagacagtctcactgtgtcacccaggctggagtgcagtagtgtgatctcagctcactgcagcctccgctacccaggttcaagtgattctcctacctcagcctcccgagtagctgggactacaagtgtgcaccattacacctggctagtgtttgtatttttagtagagatggggttttgccatgttggccgggctggtcttgaactcctgacctcaagtgattcacccacctcggcctcccaaagtgctgggattacaggcatgagccaccatgcctgacctaagatttactctttaccactggttttgaatgctttggttatgatttacctccataaggttttcttcatattttttgtccttgggttcatttagttcctgaaatgtgaagatttataatttataattttacacctggcagagtgcagcacaggaaacgagaggaagtgtcagagcccacagcttggtgaaggccactcttgactcagtttctctatccatctgctaggccgagggatacctgcattccaggacattcctttgttccagataagaattatctggttaaattctttttttttttttttttttgagacggagtctcgctctgtcgcccaggctggagtgcagtggcgggatctcggctcactgcaagctccgcctcctgggttcacgccattctcctgcctcagcctcccaagtagctgggactacaggcgcccgccactacgcccggctaattttttgtatttttagtagagacggggtttcaccgttttagccgggatggtctcgatctcctgacctcgtgatccgcccgcctcggcctcccaaagtgctgggattacaggcgtgagccaccgcgcccggcaagaattatctggttaaattctaaggttgccaggcacagtggctcacgcctgtaatcccagcactttgggaggccaaggcaggtggattgtttgaggtcagaggttcgagaccagcctggccaacgtggtgaaactccgtctctactaaaaatacaaaaattagctgggtgtggtggtacacgcctgtaatcccagctactcaggaggctgaggcaggagaattgcttgaacctgggaggtggaggttgcagtgagctgagatggtaccactgcattccagcccggacaacagagcaagactctgtctcaagaaaataaaaaaaataaaaaataaaaattctaaatttaaagtgcacattggcaaagtggccagtgtgtcaggtggttgggtgtgccccttaatttgatcactcagcttctcctgggcatcttttgtgctgagtagggcgtccagctgggaggacatcagaccctgacaagttgggccccagagtcaccctagaagctaaaaatacacaatgagattaaagaaatgccattataaacagcaatggttcatcttatttgtatacaaaactggcaggtttttttttttttttaaataaagtccagcatagacaagaatgcagggaaattgatcttcccagactctatcaggaggggtataaatcagaatcccctgcttttgtagggcaggttggtacaggattgtcacaaagtttggggggttttattgtttgtttttttgtttttttgagacggaattttgctcttatcgcccaggctggagtgcagtggtgcgatttcgtctcactgcaacctccacctcctgggttcaagtgattctcctgcctcagcctcaggcatgagccagcacacccagctaattttttttttttttcttaagacggagtctctctctattatccagatggaatacagtggcgcgatcttggctcactgcaacctccacctcctgggttcaagcaattcttctgcctcagcctcctgagtagctgcgactacaggcatgcgccaccatacccagctaatttatatatttttagtagagatggggtgtcaccatattggccaggctggtcttgaactcctgaccttgtgatctgcctgacttggtctcccaaagtgctgggattacaggtgtgagccatcgcgcccggcctaatttttgtatttttagcagagacggggcttcaccatgttgggcaggccggtcttgaacgcctgacctcaggtgacccacccacctcagtctcccaaattcctgggattacatgcgtgagtcaccatacctggccaaggttggaattttatctatgtttggcctggcaatttcagctccaggaaattttaagaaaacagttcagattgttggagccaaacagtcatgagtttgaacctggatgtaccacaggtcaccagttatgtgacctgggactagttactctacctttctgaagtttcatttgcttatctgtaaaattgggattttaatacttatatcatctggttgtagtgaggttaactgaagtaatgtgtgcaagatattcagcttagggccagacacagcgcaaaccttgtgcccctgggggatgtcttgatgacgtggatggaaaaaactgagtcagaagtggcctccaccaagcttttggtcctgacacttcctctctatccctgattatgtataggaaataaaaaggctgagccggacacagtggctcatgcctgtaatcccagcactttgggaggccgaggtgtggggatcacttgaggtcaggagttcgagaccagcctggccaacatggtgaaaccccatctctactaaaaatacaaaaattaggccaggtgcgatggctcacgcctgtaatcccagcactttggtaggccaagtcaggcggatcacaaggttaggagttcaagaccagcctggccaacatggtgaaaccccatctctactgaaaatacaaaaattagccaggcatggtggcagatgcctgtaatctcagctacctgggaggccaaagcagaggaatcacttaaccggggaggtggaggttgcagtgagcaaagatctcacactccagcctgggtgacagagcaagactcttgtctcaaaaaaaaaaaaaaaagactgaaagacacacaccataatatcagaagcagtcatctctgggagaataattttattttcctaatgccgttctgttttcttccagttttctacagtgaacatatattgcttttgtaacaagaaaaaaatgacaattaaaacacagtgtgtctcgttcttccagagcctgcctttgaaggagtgaggagcctgatgggccaggccagaggagggttttgtgggggaggttctgaccatattggtgggggctccaactatcgtggtgggggcggcaggactggagaagggctaggttactgcccctctatgccccaggctagagccaaggttggactctgagtggagattatggagggaggtggtggactatatggcttctagaggtggacctatttactctccgtgggacctcagctcagtgccttcagttctctgtgccttagtttcctcatctgtaaaatgtgcctctatgggacctacttcatagggtagctgaggcttcagtgacttttgggattttttttttttttttttgagatggaggaaagtcaactcctttcccctctgtcacccaggctggagtgcagtggtgtgatctcggctcactgcaacctatgcctcccggattcaagcaattctcctgcctcagcctcccgagtagctgggactataggcgcccgccaccacacccggctacttttttgtatttttagcagagacgaggtttcaccgtgttagtcaagatggtctcgatctcttgaccttgtgattctgcccacctcagcctcccaaagtgctgggattacaggcgtgagccgccacgcccggccgacttttgagtttttattttgagtttttatcacagtgccttgtggaccgtaaatgttagctattgtcactgttgttgttgttattattattattactattatgagtatcatcatccaccattcccttgcttccaattcaagtggtgaggagagagggctgggctgtccctcacaaagtgggccatgtgagagagacagctcatcccccctgggggcctgtggggggaggccaccccatttccctgggccttggcttcctctctcacctgtggggatggctacttccacgtggtgagaaataaatgggtcctcctgtccagtgcccacactccaaagatgcctattgagcgtctgctcccagcccttcagggaggacccatgctgtcagaaaacgaggggaagagtgtgagaggccaggtgggagggccaacttggggtcaggtgcccagccaccgggaggcccatctccggcatccccagctgcccctcctccagctcaccgatggccttggagggagcaggaccaacatgggaacattaatccacctcattacctccctttgctgtggagttgtagcaattagacctgcagtctgggcagcattaggagccaggcaggggtcacccgggctgctggccccctgccgacccagcctcagcctggactcactctgtctctggggagaggggccagagaagggagttccctggcagcagaatctccctcatcactaaagatggatgcagagatggaagctttggcctcttttcacttacccactcacaggtgtttaacagatgtttatggagcacctactgtgtgccctggagacagatgtggtccctgccctcacagagctctcaacaaaagtaaaataattgctgctagtataaatgctgtgatggagagcagcagggtgacaggtgtctgctggggtggtcagggagggcctctctggggaggtgacatttgagctgagacctgaacacttacaaaggagccagtcttttgaggatctgggatcgggtgggggttccaggcagggaacaaactggggaggttgtgctggcggacatgttcagatgcggctggaaaagagtcgggggcgggtagggggagatgaagtcagagaaataaggacagggggtgcgtctagccataggaaggacatgggttttccctgagtcaagccagagaccttggaaagcttggagctgggaggtgatgtgatcagattcatgggcatgagacttcctctggagaagggatgcccaggagaaggctgggccagtcatctggacgggatggagaggatgaggtctgggtaggggcaggaggctgggctgggcaagggattcagagccttccaatgagtccttcccagcctttgagcctcatcctcttcaccaagaaatggcccgatctccacggcccccctcctttcctctccttttgacacctgcagactttccctgtcccgcccgttccgttttttgttttttttgttttgttttgtttttttgtttctttgtttgagacagggtctcactctgttgctcaggttggagtgcagtggcacgatctctgttcactgcaacctctgcctctggggttcaagcaggtcttctccctcagcctccctagtagctgggactacaggcgcccgccactgcacccagctaatttttgtatttttagtagagacagggttttgccatgttggtcaggctggtctcaaactcctaacctcaagtgatccgcccgcctgtgccatcttgggtgcctcactgtgcatcatctgtcccggcagccccaggaggaggtgcccccatttcacaggtgaggaagtggagactcagaggggaaaggagttgcccaggatcagagctgggcctgcctgggtctctattctctctagcacctcccctcccatcccagccccccaccagtcaaggccccttctgagccatgacctcaattttccaaggtaaggcagcttgttagcatctcaaagaacactctcgcctgccaccatgtatattcatggagcttcaaagaggaagctccagacaggaggctctttctttccttccaagagcaaattctcaccctctcagatgcaggatgtagtctggctggaaaaagacttattttttcttctttctctctctttttttactagctagtaaaagggagatgctacctccggctcttaacgactgaacatttgttctgcctggttggtttgagaagttgtgggggcttcagagaccttggccttgcagtggattccgaggccatctggtcccactttgagggtcacagaggatggggacagggttcagagggcatcagggcagcatactcatcctgctgcaaatgcaccatgaaaatgcagctcttctccttctattggtgtgtgcttgacatttttcatactaagaagttaatagagggtttttttttctaaaacccctgagctccctgagcacctcactccgttccagccactctacctttgcccacgcttcccctctgcctgatgcgcctctgtgtgcctggtggattcccgtgcatgtttcaaggcttgattccaatgtcgcctcctctcagaagcctcccctgactccctgggtggtcatggctgtgctatgcttcctcctttatccagtggatggctttgattccttgtagcagtcctgtgaggaaactgaggcttgcccaaggctgcatagcatgggtgaggattcaaatgtgtgggttgctgtgtgactccccgcgaaccactctgcccttctgccctgcacatcacacggcattctgtaggccaggtcttcctggctgggtctgcccctgctggcctcgaagcccttcaagggtgggtccacatgggtgtggatcttgggtacccagcttcgggctgttactgaggatgcactgacaggtgtttcccaaatgggtgaaaacatagataattttccccactccctgccattatggagctaaggcagaacttgggaaactcatgggacctgcctttagaggcactaggagcaagaaacccaggcaggctggaaagccactgtccccacccagcgacccacaacccacaggggtgaccaggtatctggggagtggcgactctgtggacagcaaggatgtcgtgtgtgctgcgtcattcagcaaacacagattgagctctgtgtgccaggcacagggctgggcaccagaagcacagcggtgaacaagccagacccagcccctggcctcccagggctctcacatgagaggtggagggtgggcagaccagaaattgacaaaaatgctacagtgtggaaaacaacaattagggggttggtctgcagggcctctgggggctgggagagttatcagagacttttcagggggtattactgaggctgagctctgctggctgatggcgagctggtcagggaggtgtctgaccagcatcctgcaaaggccacgaggtgagagaatctaagctcactcagggaacagatgagaaggagtgtgacctgagggccggggaaaggagaaccattgaggtctgaggggcatagcagcggagacagggcttggcttgtggttcgaaaagccccctgtgtgtgcagcagggagtgcaatttgcaggggcccaggtggccatggagaccccacgtaggaggctggtgctgttttcaggggagatgaaggtggcctgaatcgggacaggggctggggaggtcaaggcgaggggccaacccaattttagaggcagagcctgctggattttgtactgggctaggtgaagggcaaggaaggcagtctggctgagccctggaggtgaggaatgctggttactgagattgggagttggggctgctggagacacggcagctaaggctttctttgtgaggatctccacagtggcctaggggcagctgggtcgccggcacagggtggtccctttcccccagtcctgcctctcagcctgtatctgggaccgacgtgtctattggaggtgaaaatcatgcctcccgcctgagcccgattgccccccgggggtggcagaacgccaggtgcccattttaattctccgacagtcatactgctttattgttcctatttgggattttattattattgctgttaatggtttgaaaaggccttttaattaaagctgcaggttggagctggcacctgagcccctggggtgggtgggaagaagccttgccaagcgttcaccccacctcttacagagctggaggcttttgagatgggggctgtgaagccttccatggggagactaggggaccctgccgttgagaccatggtacagccaccgccaggcctcagttctctgcctgtgatacaaccagaagattttcccagcacagatggcatgacattgatttgtaaatggacctgttggtagggagctggtgggacacacctgggtttcagtctcatctttgctgcttactggctgcaggaccttgagcaagatgcttaaatggccgcagcctctgtttgctcatctataaaatgggagtgctgagttcctgcctccatagggctgttaagaggaataaagagatgatccaacccctggcccaggctgaacactcaataaatgggggtcatgttattgtgactgtcgagactgtggggatcaagcgaggctgtgtgtctgagcctagcacgtggtagatgctccggacacagctgctccggacacatcagctgctcttatagcagatgttgctgccttctcctccccttcttcctccctcttgttcccgaacgtgcaggaggtttgacccgtctttgcctttgcacatgctgtttccccatccgtcgtgcctcccttcatcttttgcccacctggacatcctttttgacccaggtgtggagctgccccctctgggaagccttctccagctcctcctttgggacctggtttcccagagctgcccaagcatcccctcttaggggcctggtctccctgcctgtaatgacttgttgactcccaggggttgcaaactcaggggcctgcaggacctggcagatcagatcagagaggaatattgtcgagtgaaggatgacaggttcctgtttctaagcgctgctcccaccctgtggccagggccctcctcccctgcctccagagggacagttccctttagagagtttgccaatccagtccatgcccatggaacacctatagtgtgttgccctgagctgcggggcacctccaccacgaacttcctccatttccatcctcgtaaccacctacgacatctttccatgcccatttggctgacgacgagacaaaggccacagagctgaagtttctggcctccagggtcacctaggagacaactgttgatgccccatcctgatttcctcccctgaccaatattggcagctccatcagaatcatgttcttccctaggacccttgcgcttgctgtttcctctgcctgagactctgcccccagacacctgcagggcttcccgcctgtgttaaatgtcgcctcctcaaagagccctcctctcacccttctccctgctctgttatgcctatggctgtgatcacaccctgacatgttgtacatttgtttgtttaatctgcatctttcccaccggacttcaagtcagcagccctgtgtgtttggcttacatcttatctccattccctaggatgatggctggcatgagtaccagcaggtgtttgtggatgagtgactctcctaactgtgggtgtgtgtgggactaaggggacaatgggggtccagcagtcccaggggcagggaaactgggaaactggagggcccagagggcagcccccatcagctgctccccactcctctggtttccttggctgccttgatgtgcccacccttgactgtggccttgcatccaaccagagtgggcgtcagtccagctttgctcccgcctgctgtggagacagccagcccccttctccttcctggggccactggagcccagcagaccccagaggggcccccagcccgcacccagtctcccatctcagccccctctctgctgtgcgcacacctctccctcctcctacagcaaatacattttggacttaaaataaaaagcagatacggcggaggaaggcggagggagctgggggagtcgggagagagtgggtggggcccagcagcagctgcagccgcatttccccatggtgggtggggatgaccaaactcattctgcgcatcagaaactgggtctcagagaggttaagtgacttgcccaagggacaaggcccagatacagccccagcgtgatctacatacatactggaggtcaggctcacttcagccctgagggcaaagccagaaccaacaggatgttttaggggttactgctcattcgctcaataattcatggaaatgacatgctatgcccagcggcaggctgtggagggggatgggagggaagtggtgggggtggtggagggggcaaggcccgctgggtaggtgcagggaaggcttcaggttggggatgtgaaggatgagtgggcattccaagcagctggggaaggcgggaagggagtccagataaagagggagtcctaagccactcagtgctgagctgagatgggcctgagagggctgggtctgccctgtgctgtgggctctggagggtgggttcaggcacagacaggaggcagggacactggctgctcctcatggggtctcctgactctgggatcctgagggttaaatttgcagcggatgcagttgtcacaataacccctcctctgggaagcgggtgcttcccccccaggatgtttcaagcccagacttccccacccctctgtgtccctctgcagcccatggcattgtgccctttctgcctcttctggtgggagaaggcctaggctggttgttgcctgctacctgtgctgggattggtggtatgcctgtgacccctcctgatggatgtcagcctgctgggcacccacaggcccttgcctccccatccctgcctacctttagcctcaccactatgccaagagggaatggggcttggcctgtgccaggatgaggaagccgaggccccaagaggggaggggagggaggagtgggattggggagtctggaaggcctgggtctgccccagtcctgtggtccacatgtgtgggcaagtagcctgtgcccctgaacctcatggtcctcagctgcccaggaagctgggaaggttgcagggttgggaggggagcttcttaagctgtgtgtgacgccctggacacatggtgtggggagctctgtctgctgagagctgggcactggcagggactcacccacgagtgcaaggggggaggcaggagggcccatctggaggctactggaatggtagtaagaaacaccatgccgggcccattggctcacgcctgtaatcccaacactttgggaggccaaggtgggcagatcacctgaggtcgggagttcaagaccagcctgagcaacatggagaaaccctgtctctactaaaaaaaaacaaaaaatacaaaattggccaggtgtggtggcgcatgcctgtaatcccagctactcgggaggctgatgcaggagaattgcttgaacccgggaggcggaggttgcagtgagctgagatcgtgtcattgcactccagcctgggcaagaagagtgaaactccatctcaaaacaaacaaacaaacaaacaaaaaacagtcattcatttagtcatgtattgagcaccgcctgtgtgcaaggccctgggccgactggcctctgtccttggggagccgtcggtccagtaggggagtcaacaaatgacaacaaaaaaatagataaataaatgaataaatgaatgcaaccgtgccacacagtgaaaggtcccaacgcagtcggggctgggaggtcctccctgggcaagtgccatttgagctaaaccctgaggaaggagtgacagccacccaggtgaagagggagagaagggcattctgggcaaggaaacagcatggcaaaggcaccgaggcaggtggggcagagcaagcatgaaggcctgggaacactggtgagccagggagcaagagccagagggaggaggctgagaggggctggggactcagcggctctctcgggagacattgcagattttatctcaagagcagtagggagccacggagggttttaggcagaaggtaatatgatctggtgtgcattcatttttttgagatggagtcttgctctgttgcccaggctggagtgcagtggtgcgatctcagctcactgcaactctgcctcctgggttcaagccattctcgtgcttcagcctcccaagtagctgggactgaaggtgcgtgccaccatgcctggctaatttttgtatttttagtagagacggggtttcaccatgttggccaggctggtcccgaactcctgacctcaggtgatccacccgcctcagcctcccaaagtgctgggattacaggcgtgagccactgcacctggcctgttttttttgtttgtttaaggcaaggtctctgtctgtagcccaggctggagtgcagtggcacgatctccgctcactgcaacatcaacctcctgggctcaagtgatcctcccacctcagcctcctgagtagccaggactacagccaccacccctggctaatgttttttaaaaaaattttgtagagactgagttttgctccaactcccaccttggcctcccaaaacgctgggactgcaggcctgagccatggcgcccaacccagtgtgtgttttgatgtgcttattctgccccctgagtaagggagttagaggaggccagagtggagcaggggaatgcggggcacaaactcccagtgggccatctgcaggaccagcagtgtggcatttgagggggactgagaaggctgtgtttcctgtggagaggcagagccagtgctggcatttgctcatggaggggacgcacagctccggcagaggcgttaaggtgggaatggcagaggagggaagatcccagagggcctgagctctggacctccggcaagaggtgcatgctggacaggcagtggaggctgggttgggggagtgaggctaaggcagccgcagagcggggaaggagaggagcctggagtagccaggggtgttgattagcatattcatgatcttgccgcccacatgaatatgctaatcaaccctgtggggtttgggggttttttgttttcccctctgtggtagaaggaggcctaagttcccaataccctcacctctgggaacagagccccaagtatgagtgcggtaggaggggccccacatccccaacatcagctcctcccttctcctggctgcccaacagcccctgcacaccctccgtttctcgggaacttctggctgttccggaagtggagatggtgaggaaggggatgtccttgggatgcccatgccgcacccacactgcaggctgggccaaggctgcccggccccatgctgtggttccccgcacgtggctgcttctcgggagagacccgtgcacgggtctccagtgactcaccctctccgtggcacatgtggcagggagtgggtcggctcaggcaggaaacaccaggggcttgccacaatcgccagtctgtccccagtgcccccgacacctatgtgcccccagcccaggtcgggggtctctgctggcctccttgcaccctggtctttgtgaccagggaaatggccacatcagatcagcggcattagttgtgtccccacccctgcccaccctctggcatgagttcctgggcggcagggctgagtgcatgagaagaggcggagacactgctgcccagactaggcctccctctggcatccctccggagaccccaggggtcccccagttcagcctggtccctcggggggctgtcgggagccaaagagcttgatgcaggtgctgcgatccagcgggtggagggggaggcataattagctgtcaccagaggagtgagtcaggcaccactcgtagctttgagtcagccccaaaggggaaggggacacagccaaggtcacatgccagcaagttgggcctggtctccctgagcacctcccacccctccccatgctcctcctggaacaaactgggcctgctccaggcggtagctctgaggagagctgggaggcatttctatcacccattgcacaaagagggaaactgaggccagagagggcacttgcttcctctgtgcaatcctccctgtctgcacagctctctgttcaggtccttaaacctttaccaggctgctccccacctcaggacctcggcccggccatctcttctgcccagaacacttccccagttcttatccatcaagactctccacccgagtgtacttttcagaggagccttctgtgacctttgtcttgacccctggttttctctgtcccaggcccttgggacacttatcatgacttacaattgttttgccagttttgtctcacccccttgccaagagctcagcgtcctcatctgtcttgttgactgccccaaccccagcccctagcaaagtgcctggcatgtaccaacgatggtgatgcctggcactcactgatatgcaccgtgtgccaggcaccatgcaaccacctccgaaagcctttgttcccgcagtaaccctttgagagaggtgcggtttccatccttcctggtttagagatgaagaacgacgtgcagggggccacaggccttgctgaagggcacgcggctcccgcggggaggagttggtgtctgatctcccagatctgcacttgggtggcccactgggctgccaccccctcagtccctctgctctagtgcacacagtaggtgcttggcaaatattgggtgggtgaacagatgggagaacaagcttctcccagagtcacccagacatcgggggaagggcgggcctgtcgtcccagcttccgctctccagcattttcctaatgctgctggggcgccgtccccagcactcagtgggcaccaccacagcctcccgccttcctgcaggctggcagagcaggctcagctccccaggcacacttcattcgactttctcctcatttctttgagcagattgaagagtgggaacagcagcaggctgttggatcggggtgtcggggacaagagggttcatttcccaggaacccctggtggccggagtggagccctgaagtccaggtaggaggctgtgcacatagccccccaccaccctctttctgggctggggtctccccagcgaggggccaaaggtcagaactttagagccaggggcctccatacatttgctgtgtggtcttgggcaagtcactccttctctctgtgcctcagactcctctttggcaaagtggggcacaagatggctcctatctcttcatcccactgcaagaacctggaagccaaggcacggcctccagaagggataacgggagtgcttgttggctgaatggagttgggggctggatagacagggtaggccagtgagtgtgtctgggtaagggcctatcagggaaaggggagtctgtttggggctggaggcctcagcccagtaggttcccagccttgaaggccaggcccagctcccaccaaggccccatgacagcctcggtactaccaatgctgatgaatgcctgggcgccagcagccaccccgctcagtggaatcagctgtgatttatgggattggggcccgcagggagcaactgtctgagctcagagaagcctcagaaaaatgggtcaatgcagggcagggctgggatggaggtaacctctgccaactggaaaggctcagagactggctcctctgccgcatagtcctggtggggaaactgaggcccatggaggggcctttgctggcagagaggccctctagtgggcagcagaaatcaaaagccagaactagtgtccagtactgggaggtaccttatagacttcagggtagccagggaaggcctctcagcagaggcgacatttgtgctaggccctgaggcatgagaaggagccatgctggtaggaggtgagctggtggtgggagcagcaagggcctgagcttggaggtgggacagaggctggcacgttcaggaaagaacaaggagggcagggcacctgagggactgagtgagggggaggggagagggagaggatgctagagaggagcggggactgctcagccctgaggggccttctggccctcagccccagtttgggccttttcctaagtgccctggaaagcctctgaagtgccggcagctcaccggctcacattttacaaagacccctctggcctctgtgaaagtgaattggagcagcatgtggaaggcagggagtctgaggagacggctgcagacatcgtggcaacgaacagctgtggcttggacccagggtggccaagaaagacccaagcctgggagctagaatttgtccctgggattctagtttaagccactcatctcctctgggtagtgaccaattttaatgtctcaaaactgtgatcccttgatgccccacaccagggcccaggaaccgtgtttcacagagtcagtgccacatcataccaactttatgatgtgctcaaggtcacccaacttggaaggagcagagctgggatgggaagctgggtttcttagttccaccgctttttaatgcctcatttgcccctattcccaccggaggtgaaagctgcacctcctcaaggaaaaaaaatggatttttgaggctaccaggtacccccccccaaccccccgttgggtgaatttgaactatatctgtgtctgcacgcatgcatgcacacacttcactcagcaggaaatttgggacaggagcagcttgggtgcatgtctgggccttctccttgctgggaaaccaggccagagctggagaggccccagcagcactgctctggtgccaccctctccccggtactcagatgcctgctggcaagggcactggtgggccccgagtggctgctggcccgtggctacagctgacacacattgtctctgagctacttcatgtttctgcctttgacagagaaccctccagcagagcagtgggatcactactgagggagctgcctgcctgctgttccggccatgggggtgcaggggagtgctgttcaccttgccaggggagcctagcatagaccatcaggaaaaagtctgtgccgggaggtggaactgtgggttttctgggtgactcgtggtaaatcaggtccctctctggtcctcacttcccccatctgaacagtgggagtgtggtgggatagattcagtgatttcaaacctaacctggtctgaatctctgctcccgactcttcactagctgtgtgaccttgagcagttaacttcacctctctgagtctcagaatattcatctgtattcttatccccattttcgtacttactttacccgactgctgggagtagaagcaggtaaaattcttggaagaccaggcacacagcaagcacccaagcaaagtcagcctcccgaaataataacaagtccacaatgtaacagtgatggctgatgcttactgggcccctccatctaccacatgcctcatctgcacttggtcttcactacagacccgtgaggtcagtgcccttattctccccagtttacatttgagggaactgaggcacaaaagaggagctggcctgagatcacattgctggggtgtgtagagcccagccgaccatggctccctacctgtccccaggtactcatcttcctttcttaatccccaacctccagctgctcttagaagtgttttccaggggaacctggtcttgggagcctggttgggatttcagaaccttggacagctcccagtggacctgggcctcggctgggcctagggccctgggtgtgaggtcctattcagtgggatgagaccctccacctcatcttggccgtgtggaggcagcaggactctggatgagccagcaaagctaagggtcccccctccttccctaggcacatcgagtccactggacccagaggctctttgggaggggaggagccagggccctacttccatgtctcagcacctccacacccctcctgggccttgccatcaccatggaaacaggtggaggatgcactcccaaagaccccacttcaggaacttgggcttgggaagctcaggactaaatttgaagggacctaaagtcactactgcctctgttttccctccagcccattatacaagatggggaaactgaggcctagagaaaggaaggctggattcttgacatgtcccagctggaaggttcccaggtatcagctggccccactgttccattatatagacgagagaactgaggcaaagggaccatcttcagagaggtgccccctgcaattggcttctggaggaatcgctttttttccttcctcacaggtgccataatttgaagcatgtgttgtttttgtgtttggtatctcttctcctgctggtggacaaaccaaggtcagggccatttgtttgtggtcatatcccagggtctggtacacactgtggcagatagagcgttggctctggggccagctggcctaagttcaaattccagcttctgccaaggctgtgagactttgggcaggtcacttctcttctctctcaggctcttcatctgtgaaatgggagaatgatggcatctgcatcccaggcttgttttgaagattgactcagatggtataagcctcaagccttgcctatggcgaatgtacagccaatgtcagctgttactatagtcacctgttagtgggtgcccaggacgtatttgttgaatgaatgagcagaatccacccacctgccccactgtaagggcttttcttcaggacatcaggggctgcctcctcctgatcctattacttttttttttctgagacagagtattgctctgtcacccaggctggagtgcagtggcataaccatggctccctgccgccttgacctctcaggctcaagtgatcctcccacctcagcctcccaagtagctgggactacaggcacttaccaccacaccaggctaacttttttatttttgtagagacagggtcttgctatgttgccctggctgttctcaaactcctggcctcaagcaatcctcttgccttggcctcccaaagtgctgggactacaggtgtgagccaccatgcccaccctcacattttttttcattccagcagacaatgacctctcacctgccttgtcagagggccttgaaatttagcataaattgtaatcccttggagggacttgatgcgaatccctggcctcaccaagaccactgggatccagggctctatgggcagagtccaaggactgacggctgtgggtaccccatgcttgtccgtggctctggcactattgtggctgcctcagggggttcagtgaagaactgtgccatagccattgtgctgaccatgtgggtgacatagccctactcactgttagcaggagctctgccctctgggacaggcactggaagcctaagcaagatgctaggcccagagaggaaccatccgggacactctcctggaagcggtgggtttcagccaggcctgaaagagtgggacggatgttgcccagctgagattggcagatggcattgtggatgggggaacagagcccacaaagtggtgcaggcaggaaaaacaggttgtgcctggtgtgtggtgtgggatgagctggtagatgatatattgggagaagtaggtgggatttatctggattgtcaaagacttggaatgctacatcttatacaagccccttgatttcctctctctgttttccttctgtcacttgagtgttttaggacccatttttttttaattctatgaccccaatttctactcttcccctctactccagttctttcccatcacctctctcctcttaaaactcatgcataccctgacctttcaatctgtttcttatgaagtgaatccatgctgaagtcacagtggccaaaaatgagttgtcacagggctggggaggggtttcttgtaacaggggccttcagtacctcggcccaagacagagacttcggtggtggaaacttgggcagcacactggggacatttgagagaacattgacaggtctgtcactccagtgtgtggtgtgggcatttccagtcttttcctccttcctgaagctttgcctgtgctactccctgtgctgggcactgtccctgccctcagagtgctctgtctggttggggagatgtggtggtgcagggctcccagatctcctgggggcagaacctcaaggaaggctgaggatggtccatcatcagcaaccccagctcccagctggggcctgggccagagggtcattcagaagagtgctgaccccctatgtctatggacttgactagagtcaggtaataggatcagattagaagcaaggctattggggcttagagggaggaaagatggattctttagtgtgtgtggaaggggcagagagagaggagtcagggggcagatggggccagatcatgggccactgagcaccagcatcaacccaggccaagagaagcttgtttgtccattcattcaactagtatttgttgagcacccaccatgtgccaagccctgtgctggggtgctgtggaaaatgaaacatgctcacacaggcttgatggtcagggcatgaattttggcactctcatggaaaagctgtgggactctggctacaagtgacaggagacctcaaaataatgtggcttacaggttgggcaacatagcaagaccccgtctccacaaaaaaattttaaaaattagcccaacatggtgacatgcacctgtactcccaactactcaggaggctgaggcaggaggatcacttgggcccaaaagtttgaggccacagtgagcaatgattgtgccactgcatcctagatgacagaacaagacacttaaataataataataacagcagtagcttagataggatgaaaatttatttatctcccaaatatgagatgggtaggcagttcagggcctaattggtgtctccacgatcattcagaacctagacttcttcaataaagagttgttactgtgccttccatagaatggagcttcacctcatgattcctgatgactgctccagctccacccatcttatccacattccagccatattgcatgtatgacctctaagctgattttcttagaaactgcacctatgacttctgtttatatccttctaccaaaaacgtagtcacatggccacacctatctgcacaggagggagggaaatgtacactttattctagatggccaaaggcccagctaaaatcaggagttcagttactgaagaaggaaggaggagatatggggggacaattagcaatgcctgccatgctgtttcttcatctgactagaggtcattactcttcattcatttatccaacaaatatttagtaagcatttactctgagctatggccaccttttgagtgctgtgccagctgtgaacaaaaaaggcaaagtccttgctgtagcagagcttactttcttttttttttcttttttgagatggagtttctctcttgtcgcccatctcgttctaaagtggcgcgatctcggctcactgcaacctccgcctcccaggttcaagcaattctcccgcctcagcctcccgagtagttgggattacaggtgtgtgccaccatggccagctcatttttgtatttttagtagagacaaggtttcaccatgttggctaggcttgtcttgaactcctgaccttgtgatccgcccacttcggcctcccaaagtgctgggattacaggtgtgacccactgctcccggctgagcttactttctagaaggggaaacagacactaaacaaacaaataacatcaagcagtgaaaagtattatgattttaaaaatcaggaataaagagtgatatggggccaggcgtggtggcttatgcctgtaatcccagaactttgggaggccgatgtgggtggatcacctgaggtcaggagttcaagaccagcctggccaatatggtaaagccccatctctactaaaagtacaaaaaaattagctgggtgtggtggtgtgcgcctgtaatcccagctacttgggagactgagggaggagaatcacttgaacccaggaggtggaggttgtagtgagccaagattgagccactgcactccagcctgggcgtgacagaacaagactccatctcaaaaaaaaaaaaaaaaaaaaaaaaaaaaaaaaagccgggtgcaatggctcacacctgtaatcccagcactttgggaggctgaggcgggtggatcccgaggtcaggagattgagatcatcctggctaacacggtgagaccctgtctctactaaaaatagaaaaaaatagccaggcgtggtggcaggcgcctgtagtcccagctactcgggaggctgagccaggagaatggcatgaacccgggaggcggagcttgcagtgagccgagatcacgccactgcactccaacctgggtgacagagcaagactccatctccaaaaaaaaaaaaaaaagtgagatggatgtactattttaggtgtagggaacgtagcctgaagaggaggggatatttgagcacagacctgaatgaagtaagggacaagccattaatggaaagggggctctgagaagagggaacagcaagtgcaaaggccctgaggcaggagtgcgcctggtttgacagagaaacaggaaggaggccggagctgctgcagcaacttcatgggtcatcgtgaggataaaaagggcgatggatatgacgtgcccagcattcatcctggttgttcaacagataaggtacccacatgtcatgatttgcccggggcagttctggagtaattactaacagcttccttttcaagctcataagtatccctgttgggatgataaagtatgtggtcatcacatcaataaataatagctatttattgggaaactaaattccccaaggtatttccgggaaagcagcatcgccgcgtcccaggggatgggctgtcctcccctgactgccatatactcccaacccctgccccgtgtttccgccctgaaggagcagccccatcaggcacagctgtgctgatgccggcccctcatccccacaggctcccaagcaggtgagtgcaccagcatctcacagttcccacatttttagcctgtgggtctcaagcggcttctggtgtccctcagacatgtatctagaggaggtgccatggggacaggacggggatctgcacagggacccagaaggctggcgggtgccaagcctggatcgtcccccgagctcagcttgcccttaggccccccagcccttcggcatcagtttctctttgtgtgctagagacagtttccttgtggatatagggtagcggatgagtagcccagcagctgtgggaggcgggagcaagtgcctgggtgagagcagtccctcctgggtggggcagtggggtcctgtgaccttatccatccacctggccctgaggaggccccttctccatccccagcacctgccccatcctgactccgctgacactcagaattcaacttccttcaatatctcaatttgcaggtgcttaatgaaaatgcatgcctcacttccctggactgtgaaatgggcctgatagtgtccatctgtcatttccctggggtgaatcagatgatacaatggctgacaagggcatgccctctgtaccagggcagcaggtggggaaggggcctatcatgacctcctttgttccaaaaagtatcagcccaggcctctgcacacagtaggtgatcacaaagtgcttctcacagcagatggcagagatgtgatgtgtgctgaggactgctgaccagtttggctcagtctcccttttgcagatgctggaggggactgtccctcactgcctgactccttccccagtgggctgtgggcctctgctgccccagaggctgcttgtgattgggggaaggagggctgtccctgccagcaccacaagcccctcactctggaatcccaaaggcctagggagtcaggtgccacgccggggcagctgcattgttggttcagaggtatctgtgggcccagacacatctaagctttaatctcaactccagcgtgtgccgcctgccctccggcgagtgacttcacctctcacaacttccagttcctcttctgtgaaatggggatcgtaagagaggctgctccaggagtggttgggggcccccctgcctggcacagaggagggagtggcacccactgctcccactctgttgggattactgccatctttgtgccatcttttctgggagggcaagacctggggtgtcatccgtacttataaatggcagaccccctacaagaggggtccccaacccttgggccatgaccagtgctggtccgtggcctgttaggaactgggctgcacagcaggaagtgagtggcgggcctgttagatccacctcctgttagatcagcggcggcattcgattctcataggagctcgaaccctattgtgaactgcacatgtgagggatctaggctgagctctccttatgagaatctaatatctgatgatctgtcagtgttgcccatcacccccagatgggaccatctagttgcaggaaaataagctcagggctccaactgattctgcgttatggtgagttgtataattatttcattatatattacaatgtaataataatagcataaagtgcacaataaatgtaatgcgcttgaatcatccggaaaccagcccccctcatctgtggaaaaactattttccatgaaaccggttcctggtggcgaaaaggttggggaccactgccctaccagacagcagggcaggtgcaaggtcacagtctttgatttgttcgatggatatttcctaagcaattactatgccccagacactgtgctgggggctgcagatgtgttggtggggaagagaaacaatgtctccccacctggagctcgctttagaaatgggggctcctccaaacccacctgtgggtgtgatgtgctgccggccgggtggtgtgagtgctaagaggcaaaacgaccaggacaaagtgcgaggaagcccaggcaggtgagacagggtgtctggtctgggtccaggaaggcctctctgaggaggtgacagctacagaagctcaggggaatgagggagggagagaaccccgggtgatccagggaagagtggtcctggcagcggaaacagcaagtgcaaagggcctggggtggagcagctgcaactgaagaagaggtgggaggccagagttggggaaggagggcatgatggtgagagtgggcgatggcagagacgcacatggggaccagaccttgtggggccctgtaagccagggtgaggtctcagcctccactcagtgagatgggagccactgagggctttgagcagagactgtgtctcaacaggactatctggctgcagtgtggagactggactgaagggatcatgagtgcaggcagggaggccaaggggcctctaatttgggggagaggtgaccgtggctgggactcggtggcagaggtgggggtggggagggccggctggattctagagatgttttgaagggaagagaagcaggatttcctggaggactgagtgtggggcgagagagaggagtccaggaagacgggaaagtttttgtcccgagaaaaagaaactagagctaccctcaagtgggatggggaaaactacaggaggagcaggttcaggagaggaagggaaggcggtgaaaattgtctgataccttgtagacatccaggtggacaggcccagcaggcagtgctgcatggagatgtctagagtttgggggaggccaggctggatgtgccagtgagcaggataggaggctggaagggtcgccagggagtgagagctggggtctcttcaggcagggaggtgtgggtgacgggaagcatgtctgctgaactgaaagtctagatgttggtctgagttataaagacataaagaacgggactcttgctgtcataacatccacaagaggggggctacggaaatgagtggctgctcagcaggcccaggttctgcgctgccctcacctcctcctgcgtccactgtgtggccttgctaatgcacctgccccctctggaccttgattccttgactctggtgaatcatccttttggcatctcccatggagatgctggggcagcctcagagacttcaggtggcctagaaccatggaaaatggggagaaggggtggccaggggtacccgacgagctcagagcagagggtggggagaaagctgggcctgcagagcggctttcctggaggggttttagacagggcagccatggctcagagagaggaagaccccctccaacccacactgccctgcggcaggtcctgctgggatgactgagagggggcggctctggcaggagtcacacggtgacctcagctgtccctgaaaagtggctgagtcagcatctgggctgggctgggcttcagtgcccaggtgcgtcttctccatggccaggcaggagagggaaggccccttctgctgtctccccagccctggggccttttttctgctgctgatctttttgaggactcttttttcttttcaccatgaagggcagaagcatttcttgtaagcacctggttacaaactcagcacatgcaggccacagggggcccaggagccgtacagctggggaagctgaggcctggtgctggagagagacttgccctggtcacaagagttggaacagagctggggctccaacctgtgtccgccactttgccattcagaactctgaggaacttaggggaccagcggaggaagaggagccggcaaaggcagtgagaagttgcagcagctctgatgactggcttggcccaaggggcaggaggccacacctgccaggggcttcctatagatccagttctgtacagaatgtcctgtgtgctcctgtccacagctgtgccatcatcatgtccatctgagtcagagaggttgagcgtcttacctaaggtcacccagcaaatgaggggcagaagtgggtttgcatccaggtcagctccctcgagcgcctgctgtttccccagctgccccttgacaactgtggagaacaaaacgggaggccagcaggggtcaggtggggatggccgtaggaaggacagagttctgtgccggccggcctcccgcctcaggccacattctctctgggggacttgtcaactccactggtgtccctctgaacacccacagtccccatacctgcagctccacccctggcctttccctggggttctcctggaccgcattcccaatgtcctgattgagcccaggagttcaaagctgccgtgagctgttatcaccccactgcactccagcctgggtgacagagccagaccccatctgtagaaaacaaaacaaacaaaatcaaacaaacagctttatttgagtactgtttacactccataaaattcacctattttaagcattctctttaatgagttttaataaatttttgcagtgcacaacaaacaccgcaattcaaaagttccctctgtccatttgtagttgctcagcacatccggactgactcctgcatttgtccataggtcttctcttgccactctgtcccctgactagtgagtggcactatctggagttgaccctcgtggctgcacccaggatcccctcactgcatctccactagcctttttaaaaaacagctgtattgctgggcacagtggcttgtatctgtaatccctgctattcaggaggctgaggcaggagagtcacttgagcctaagagtttgagaccaacctggacaacatagtgagacccccctcatctcttaaaaatgaaaaaagaaaagaaaaaaattggccaggcgtggtggcgtgtgcctgtagtcccagctactcaggaggctgaggtgagaggactgattgagcccaggagttcagagctacagtgagctatgatcaccccactacactccagcctgggtgacagagtgagaccctgtctacagaaaacaaaacaaaacagataaaaacaaaacagataaaatcaaaacaagcaactttatggaagggctgtttacacgccataaaatccaactattttaagcattctctttgatgagttttaataaatttatgcaatgtgcagccaacaccacaattcaaaagctccctctgtccatttgtagttggtccccactcccacccctggccccaggcaaccactgatctgctttgtctctatagttttaccttttctaaaaaggaagtaaatggagacatataacatgtagtcttcacgtctagcttcattcactcagcataatgattttttttcttgttcttttttctttctttctttctttttttttttttttaagagacagggtctcactctgtcttccaggctggagtgcagtggcacgatcgtggttcactgcagcctcgacctcccaggctcaacgatcctctcacctcagcctcctgagtaactcggactacagatgcatcctaccatgcccagctaatttttgtggttttcgtagaggcatggtttcaccattttgcccaggctggtcttaaactcctaggctcaagcagtcttcctgcctcagcctcccaaagtattgggattacaggcgtcagccactgagcccagcagcatcatgtttttgatgttcatctatgttgttgcatgtatcagtgctttattcctttttagtgctgagtaatattccattttatggacattccacattttgcttatctgtttgctggtcaatgggcatttgaattatttccagtttggggctattatgaataatgctgctatgaacattcacgtacaagtcttcatggggacatatgttttcatttctcccatataacctcccttttccatcccaccagaccttgattcctgttgaggagccacacagctgtagggaaactgactccacccctcccgtgaggatagagctcaggccccagggtaagccaatgggcatagagctcatgacccaggctaggccaatcagtgtgttccatcctctaggcctgatgattggttcctggatgggcaagtgagataggccagtccaatcagagtgactcttaggactggcgctggaacagctgccctttttcatgccccttatagtatgtttgttaaatctggagcagacaccctgtgtgcattagcaaagccagctttaggatgtaattgacacatggaggaggacagggctaagaagcttgaaccctgattcaactgtgcctgaagtacaccacaaatccagacagttgcatggatcaatcaattcactttatcgttaaagccagcttgagatggtttcattgtttttgtttgtttgtttgtttgtttgtttgttttgagacggagtctcgctctgtcacccaggctggagtgcaatggtgcgatcttggctcactgcaacctccgcctcctgggttcaagcaattctcctgcctcagcctcccgagtcactgggattacaggtagctgccactatgcccagctaattattgtatttttagtagagacgaggtttcaccatgttggccatgctggtctcgaactcctgacctcaagtgatccactgcctcggcctcccaaagtgctgggattacaggggtgagccaccgcgcctggcccgttgttgtttttgtttgtatctcaggggtcagcaaactatggcctatgggcagcctgtttttgtaaaaaaaaaaaaaaaaaagttagaacacgccacttactaatgtattgtcaatggctgctttgcagtgccatatggcttgcaagcctgaaatattcaccatcagccttttaagaaaaagtttcaggcccctgttataaccaaaagcttagtattcagtatatcccccagtcatcaggacagaaatctgggaatcatccctgaatcctccctctacctcattccccacatcaaaccagccccaaattggattgattttttagtctacgtgtctcctgaatctgtctgctgtcttcaggccccagtatcctaggtgaaccattgtcagctctcgcctggatctcgccacccacctctagactaccccacaaagctgctgggtgatctttctcccacacacatttgacgaagcctccattgctcccagggtaaaggccagactccctggactggcactgcaggaccctcgtgagcgagcccccacctgcatttccagccccgtctctcccctctctcctctcgtcctcccccagagcacacagaccagcacctgacttgtgcagaagttcccaaacatggcgtgctctgtccctcttcccgccttttgtaccagctgttccttctgcctccaatgcccttcccactttgcccacctagtggacacctgtgtatcctctaaggcccagccaaagcctcgcctccttttttgttgtttctaaaatcaccccaacctgggtcagggctcccataagcccttggggctcaagaagtgttggtttgcaatacaatatttctgccttttgctgcaaagccactgtgaggaatccaaagaaggtttgaacaaggcagggaggaagagcatggctgtggactgtcagagctcggtgtgaacaaggggacatagaaggactggaactgcttgagtttccaaggcccaaagaccccaggcaggagcatctttaggaagtgcatagaaatgcctcctaagatgaacaaaatgaaccaacgatgaggtcggagaatggttccgagaaaagaaaagtagggcaggtgagagtgggccactgtggcaggccctgagagtgcggaatagaaacaaagggattacagggaaatgtcattaaagtgaagattttccacagactttggaagtcagcaagtgggacgggaggagaccagatggccggtgagggggctgcggatcccgtcggaaagtttaaggttttacaagactagccctttggagggcttagggaacatctgacttctaggttctcaactgaaaataaatttgggtaccagctggctgggtcctgagtgaaccttcccaagaagcaactgtggtggattcaggggagcactggacagggagtccgagccagctctgctgtcactggctgtatggttcttggctgccatgtcccggggtttagggctgtggcccatactcactgctaattctggaagtgaatccaggacacagaaaaccagaaaccagtcaaggcccgacctcccccatggggccacagtgaggcacgcatgagacagtggatatgaaaatgcaaactgcagtgcggtggccccacatcactgtccctcctctcactcctccagctgagtccatccccgtcctcgtggctccccagctgatgcatgaacctcactcttacgctactctgttgtggaacataatgtatggcacatctcttctcctgtcagaccctgagtacctgaggacagggacaagcatgttgggctcctgtccccaacatgtgttgcagtgcctggcccagagcagggattcggcaactatttcttgaaggactttgaattgtaaagaaatagttaacttggctgggcgcagtggctcacgcctataatcccagcactttgggagactgaggtgggcagatcacaaggtcaggagatggagcacatcctggctaacacggtgaaaccctgtctctactaaaaaaatacaaaaaattagccgggtgtggtggtggacgcctgtagtcccagctactcgggaggctgaggcaggagaatggcgtgaacccagggggcggagcttgcagtgagccgagatggtgccactgcactccagcctgggcaacagagtgagactccgtctcaaaaaaaataaaaaaaagaaaaagttaacttgaaggtgctggtcagcctcagtttataaaagcaggaaccaggtagatcatggtagaaatctttctgacaaattgacaaaatgttttgtgagtttttaaaaaatatgagcatgccagaaatgctcaagaagaagtggaactcaagcagttccagtccttccagtctgggattgagaatgctaaaagctacctggccctgagctatccagtagggtaaccatgagccacatgtggctattgaacttcaaattaaatttaaaaatcagttttgtattttatttaatttttattattattattttttgagacagagtctctgtcacccaggctggagtgcagtggcacgatctcggctcactgtaacctccgtctcccagattcaaggaattctcgtgcctcagcctcccaagtagctggaatttcaggcacatgccaccaccatgcctggctaatttttgtataaaaatcagtcttttaattgcactagtcacatttccaatgtgcagtagccacacgtggctcacggccaccctatgggagagtgcagattagagcatttccatcatggcacaaattcttttggacagcattcctccatgccttgaaaatccgtgcccatgtgttattttaagccctgatccttccgcaggggcttctgagacttagggagagatctggggctctggaatctgacccagagttcgaatccctgctcagccatttgcttgctgtgtagcctgaggcaaaggaacttccttctcctttctgaggctcggtgtcctcatttgtggcctacacaaagctgtgggttcaaggagaaagctaggtaaagggcttcccagttggtactgcgtgcaaggacctgctatgaggcacatagcggtgttcctagagctgtgagagactgcacaggctgttcctatcagaacattgccggaggggacgcctcccaggcccttgcagcttggagccactgcccaagcttctcaaaatgaggcaaggcatgctgggagttcatcgggcactgggggctgatctggagcagtggccagtgggtgtgactggcttggagcagttggtaggtgaggtcaaggctagaactggtaaggctgggaggaagggccagcccgctgaatcctgggtaggggcatgcgtcctctctgcataaaactccattgtctactagctgattaggggatcataatacgaatacaaggagtcatagcagctttatactccttgaacatttcctgtctaccagacactgtgctaagagatatactatgtgtatgcattagctctgccctcacagcaaccctttgtaataggtatgttattattcccattttgcagacagggaacactgaggccagttgtccaaggtcacacagctatgaggcggtagagctggtatctgaccccaggctgtttagctccacagagtcaatgctgggataaagtccagcccctgacccggtcctccaggccgtgtggagccagcctcagttgccctttccaccttcatctctgtcactcctcatcttctggtcaagttcctcagacatcccaggtgtctccctccaatgtctgtgcccttgttcacactcctggtcccctccagcctctgcagactcctgttcacctgccacgaccccgttctggtgtgtgagcatcccgaggctgggaatgggtttaagttgttttcatgtcataaagtcctgcacgtggcttggggcgtcagggccatggcgaattgtgggtggcggcttggtgggtgggtgatgagtagctggaagggtggggggagtagatgaagggtgaaccaaggggcgggtggacagactggtggaagagtgggtgggtggcatgtgctgcagtgccctcagtggggcggggcctgagcagagcatggggggctggacatggggagggatggcggcagggaggggtctagggtgatgcctacttttctagcttggggtcttgagtgaatcatggtgtcatcagggcagggtgggtttaggggagaaggggatgaggtccattttggacatgggggtgtgacgggccaagggttcaggaggccgctggggagatgagcctcaggttcagaggtgacctcgggctgcacagagagactcgggaggtcagtatgggtggtgattcgagtcgtgggggccaatggcgtcaccacctgggagctgggcatggggtgagaaggactcaggacagaggaacagccacatctcagagccagcaaaggagggggaagaattatagtcccccagatagaaaagccaggagtgtcagagcaacagaagagtcttgcggagaggagaaacaaggtgttgggggtgtaagaagcccccagggcatgagggaactccgtcagtgctattttaaaaaaactatttttccatttcagttcaactttacaaatatttattgagctaaaaggttctgtgtaaatccattttgtaaattaaatttttgtgcaacaaataccattttaactgggcctgaggtggcaaggtttgggagaccattcattattcgaggaaccctgagtcgaattcttttgaaaagctttgtttggtttgttttttgtgtcagcaaggattttggcttttcaggcttgcagagtgaggcgttcatttgttccacatgcgttttgaaaagatccttctggctgctgcagagaagatgggccagggaggcagccgggcacctagggaggaagctggtgcagtgtccgaacaagagatggtactggcccggacgggggcgactctgggggatcaaggggaggggatttgagggatgtataggaggttttttaaaaagataggacatggcctggcatggtggctcatgcctgtaatgccagcactttgggaggctgaggcaggtggagcacttgaggtcaggagttcgaaaccagcctggacaacatggtgaaacccccatctctaccaaaaatacaaaaaaattattagcggagcgtggtggtgcatgtctgtagtcccagctactcgggaggctgagacaggagaatcgcttgaacccgggaggcggaggttgcagtgagccaagattgcgccactgcactccagcgtggatgacactgcgagattctgtctcaaaaaaaaaaaaaaaaaaaaagataggacattgccagccatggtggctcacacctgtaatcccagcactttgggagactgaggcgggcagatcacctgaggtcaggagttcaagaccagcctggccaacgtgatgaaaccccatctctagaaaaaatacaaaaattagctacttgggaggctgaggcacaagaattgcttgaaactggggggcagaggttgcagtgagccgagatcacaccactgcactccagcctgggcaacagagtgagactctgtctcagaaaaagaaaaaagaaaaaaagataggacatagtcttgggctttacttctgggtgagtgaaagaggagaaggaagaagaatagaagcctcctggcttcttggtcgcctgagggtgaccaggttagatgatactgggatgagggcatggtctccagggaaggtcacagactgggccctgtacacatggagtacacagtgtctgtccacagatggccagcagagctgctgtaggaatttggagctcagaggtgtgagctgggctggaaagagaaatgtcacatctgcgacaaggaaggagggaaaacccagagctcatgacagttggtcaaggaatatctccagtattgaaaatatttgttcaatgaagtattcacggagcacctccatgtgccaggtacagcgtgtggcaatgaaacagacagaactctctacccttcggggctgacactttagtgagaggagcaggcaatgatcaggataaattatgcaattacgtggcctgttgtataatgatatgggctgagaaaaacaggaaagcaggcagggacaggctcagggaatgtgctgtggagggctggggagtgtagcagacacacaggtcacacttgctgaattcatttgagcctcacaaccaccatatgaagaaggctctataactacccccatcttagagatgagcagctgagttgcagagaagatatttgcccaaggtcatgcagccacgtaactggcagagcctggatttttacttggagttcatacttttgagtcctcctgctagggtaaaactccctctcaatgacaagatcaggtctcagcaaagattctgaaagaagtgagggggtaaggttcacagacatctgaacacaatcaacattccaggcagagcaagagcacgtgcaaaggccctgagctaggcacgtgcctggtatatttgaggaacagcccaaaggccagcatagctagggcaaaaggagcaggtgggggagggaaccagaggtggtgcagggctgcctgtggcgtctgcagggctgttagcttttacttgaggtgcagtgaggccatggggagtgtggagctgaatacaaggagtcatagcagctttatactccttgagcatttcctctggcttctgtgctgggagcaaggtcagaagcaggacaccagagagggcatgaataatccaggcacgaggtgacagtggctcggtccacagcggtggcagcagggtggggaaaggaggaccggtggcactgctgatggcttgcgtgtgagaggggagggtgggagagacctcaagtttggcttgggcctgagtggctggaagggcaggattccattgactgagatgggggcagctgtggaaggagccacttcataaagaactttccatgtccatttccctctgaatccctggctaccctgaggtaggtattgaaacttgagcagttccatgatttgcctgggattgcttggctggaaggtaatagagccagggccagaagccgtatgtgcatcctagggtttggaattttgtctcatttattcaatcaacaaacatttctggagcacctcctgtgtgccaggctgatggaggaggctgtgtcagccaatgatcgtggcaatggttacctcacatcagcatgagcagtggtgaggagaagccgagggagctctaggagccagtaacgggcaggagggaagggtgctgcagggccagggagggcttcctggaggaggagaatatgacatacaaggaccacaaaggaccacaggttcccagaggataactgcctattgggaagttgcagaatctttttgttttgttttgttttgttttgtttaagtgttaataattgagatatagaagctgagcatggtggtacacacctgtagtcccagctattcaggaggccaaagtgggaggaccctttaaggccaggagttcaagagcagcctgggcaacataatgagatccccatctctacaaaagttaaaaaactaacttggtgtggtggctgatgcctgtagtcccaactacttttgaggctgaggcaggaggatcccttgaacccaagaatttgaggccaggcctgggcaacatagcaagactccatctctaaagaaaagaaaaagaattgagatataattcacataccatacaactcacccattaaagtgtatagttaatggcttttagtatatttacagggttgtgtatctgttaccacaatccatttttgagcattttcattacctccaaaaagaaaccccacaccccttagctgtcaccatctctcagtccctgtccccacactgggaagcctgaggcagcccagatatactttccgtctgtacagtggcacctgttctggatatttcattgaaatggagtcatgccatgtgctgtcttctgtgtctggcctcttccacttagcatcacatttcaaagttcatccatgttggaagctgcagaatcttcaacagcatcacagatggcccggacccaagagactgtataatggtgcttcccgaccattataaagaagtggggccaagctcagtagctcatgtctgtaatcccagaactttgagaggctgaggtggatggatcacttgaggccaggagttcgagactagcctgggcaatatagcgacatttcatctctgcaaaaaatacaaaaattagtcaggtgtggtggtgcatgcctgtagtcccagctactcaggaggctgaggcaggagggtcgcttgagcccagaaggtcaaggctacagtgagctatgattgcaccactgcactctagtctgggcaacaaagtaacactctgtctcaaaaaataaaaaagaagaagaagaagggggaatcaaggaggagacttgccgttctgtcagcaaggaagaggtggggaatttgaggaggcctcgggcccctaggccagggccctgcggcaccctgccgtgctgggcacaggccacctcccttggttgccacttcttttccttcagctttgggctctgggtgaatttggctaaaagtgacaactcggtcaggaacgcatcttctcaaacaccggtctttcccgccctggcaattttcacaccttatggtgaatcttgaaatcttttatgcatcttcgagaatttgtgtctactgactcagaatgttttggggtttgtattttctttttctgctccttaacacttttattcaggtggctatgcctgtttttcttggtttggtgatgttgtccctgggggaggctgcatcgtcctggagtcaggtgcctgggttggaggccctgccctgcctcttcctgggtgtgtggttgtcgaagctctccgtgccttggatgcttcctttggaaaatagagatgacattgtaaggctgtggcaggaaggaaatgaggtaaagcctgttacaggtttggcactgagtagattctggaggtttggttcttgatcagatgctaaggagagatggtgaggcctttcagggccctgagatagcaaggggagaaaggtgagcctccccgaccagcgactgtccctttctccttattcctcccatcccagagccccctagacctggacctctcctctcagggctcagacgtggaaagcctgagttcaaatcccgacctaccactcgggttctgtgtccccacaccagctaggcttcttctgtgtctcagtttcttgacctgtaaaattggaggggagagggtggagggtgaggggagggtgttccactgaggcctccagggcagccaaaaggcttctgggaggggtgtggaatagaggggcctttttcttctccctagaggactggttcctgctgattcgtgggttttttgtttttggttttggtttttttgagatggagtcttgctctgtcgcccaggctggagtgcagtgacaccatctcggctcactgcaacctctgcctcctgggttcaagcagctaattttgtatttttagtagagacggggttttaccatgttggccaggctggtctcaaactcctgacctgaagtgatccacccacctcagcctcccaaagttctgggattacaggcgtgagccaccgcacccagcctggttcctgctgatttaaagatccaggcaggagcagtgacacctgttcaggggaagtgggtggagagggacacctggcttccctccgctctcacacgagagtgccacatggaggtggtgatgcagtgaagggcctcttagaagggcctttattgggcttatttcacctgcactgtcttctcagtcctcacagtagccttcagagaaggcactcttgttcccatttggctggtggggaaactgaggctcagaaaggggaagctgcctccctggtgtcaccccgcatgtgagaggctgagctgggatttgaactcaggactgcatgactcctacccctttcccaacttctcccatccggggaaaaggaggaagaagcaagacagggaaggatttgagactttggaacccagcttcccgactgctgtggggattctgtgggtggtgggaaaggcactgtaaatatgcatgacatgcaaatttgcctctaaaaaaacaatgtgggtgctcacatgagccgggatgccagggtgctctggaaaatgtagtgttgtgcaaacacttgggtttctatgaccactgctccatgtcgtctccttccctcgtgtccccagggccagtctaagggtctcaggtggagggcttacctccagcacctcctaatcaccattcctccccattcctgcaggcacccgtgcctcccctctgccaggaaccttggggccttgtgtgtgaccaggacctggtggcccccgggcggtggcagagcccctgtcccaagctgcttcctgccggcacctctgatcaagtgcctagagggatgtgtgtgccagccctcggtccagtgcccgctcctgagctgactcctgctgggccccgacagcttgccgtgtttcctgtgcctgtagctccctggttggtaagtaactgcgtccgcaggctttgtctcctcaccagccccccatgcttggcacagttgggaaatgcccagcctcacttccactggcacccacatgctggcagagggacctcagtcagagtttgtatatgtctgggcaccatttatagttcaatggcctgtcttagccagtcctcccaacaaccaggaggtgcgtgtggtgatcacgcccattttccagaggagtcagcctcagagaggggaagccacctgcttggggtgcacagcaagcccagctctgtccacctcaaaggccagctcttgccacacccaagcaggcggggacaggttgtgcacataggctcaggacaggaagggagccatgagctgtgctggaggccatagaacctctggggcccccagggcggcttgaggggaggccatcagaattcttgaatcttggggggccctacattcctgcccctctggcctgttctccccatgctcctccagctcccactttgccatcaggatgaggtgctgggcctgccccgtctccaaccgtctgtctgggggtgcaaccacagtgccaccacttcaccatgctgcttgcatcttttcttcaccttccgcctcccaaggctctgctggcataacaatctagttcacagatgaggaaacagaggctcaaccaggtcaagaggcctacgtgcaggctcacccagccaccacgaagcactacatggggccactggggtaaaatctgcctccttctctggccttagctctgcaaggacaaagaacaaccacttcattcccttctggccaactagcagctggccccgtgcctggcatacagtgggtacccagtaaatagctgtggaaggaaggaaagggggagagaagaagggaaacctctcttacctccctccacccagacaccagcaggacctgagcgcctcctggccttttggccagtgccagtccctgctgccccagatggcttgcggtgagcccatgccctcagcaaggtggccagcccctctggtcccaattctctcatctgctagagcctgcccagcttccctgatgggatggttatgagaagggaaaagattcgtaaatatgtataatatgcaaatgtaatgggatcttttgtttctttaacccttgaagttcactgtagataacgtatgtagaagtgcttctgtgagaacaaggagctgcccgctggggtggcgccagccttattatgactaaccatgaaaagggccccattaattagctgccccacaacctggctctcccgacccagctcctagtctgttgttgcggctgcaaatagccgttgcttttggctgagaagctggtgcaggacaggtgataaggatggcttggtctgagagctgtgtctgtgggatttaatcatttgcaaacacaccttattgtgctcaaggaatgcaagggcctctccagggactaaatgtgtaatgagggccagctgaataacagcaagcatttcttgagcaattactatgtgtttggcatcgcactaaatgctttgcatttttcgttatttcaattaaattcccccataaccctgtggaaggtgaagggggagactgaggcagggacttaggggtgagggctcatctgttaacagccagcatttcctgaaaattactgccatccagtgcccacctccaccctccgggccaggctctgagaacgcagcagagcagacagcccctggcgtgtgtggcccagtgacggagaacgggattccttggcacgagctgggtgagcagccgtcagcatcgcgtggaaagatggaggcccgggcggcagcgagggaggtgttactgctgctattttgctaacaagctggttatttaaagaacagccgaagccggagctagaaaatgggatgaggtgtctccagggcagaggcagccaggagtgctgggtcctgagacccagagacctggttgaatcacagcagagtggccacacagtcatttattttttttaatcaacttattaacatagtaatggctgccgggcatggtggctcaggcctgtaatcccagcactttgggaggccgaggcaggcggatcatctgaggtcaggagttcgagaccaccctggccaacatggtgaaaccctgtctccactaaaaatacaaaaattagccaggtgtggtggcaggcgcttgtaatctcagctacttgggaggctgagacaggggaattgcttgagcccaggagacagaggttgcagtagccactgcactccagcctggccaatggagccagactctgtctcaaaaaataataaaaacaatagtaatggcaccataaaggctggacaaggattgccttggtggagaaaagaacattgggaagggaacctcagggggtttctgaggggccagcagtgacctgggtggtggttacatgactatttccttttgatattttactgcagtaaacatttttgttttgtgcactttactctttctattacatatcacagtaaaacggctaaaaaacaattgtaaaaataatagctaatgtttattgagcacttactaacaggctgtttgctaagcattttttatctccttgaatcctcctggattcttttattctgcccattttacagaggaggaaagtgaggcttggagaggtaaaactacttgtcatgctgccaaagagtggaggaggtgagatgagaaaccagacagactgacttaagcctcatgtgcaaggatcggggtccaggaagttccccgcaaagggccagggactcctccattttttcctcagacatgtctgtgcctcttctatttttaaggcttgggaggccaggcaggtgtgtgcagtcataggcagcagatgaggagcctgggggtctccaaggggacagagcagagcatttagctgtttaacaagtatcaaagagctgggtgcaatggctcatacctgtaatcccagcactttgggaggctgaggcaggaagatggtttgagcccaggagttcatgatcagcctgggcaatatagtgaaacctcatctctccaaaaaaaaaaaaaatttaaatagctgagtgtggtggctacttgggaggctgaagtgggaggatcacttgagcccaggaggcagaggttatggtgagctgagattgcaccactacactctagcctgggtgacagagtgagaccctgtctcaaaaaaaaaagtattaaaggataggagtgggacgttcctagggacaggcctggggagaaggccaaggcatactcaggtctcatttaaagtaataaaagaggtgggagaatggcttgaggccaagagttcaagaccagcctgggcatcatagcaagacccccttctccaaaaaaattaaaaaaaaattagccaggcatggtgatatgtgccggtagtcccagctactcaggaggctgaggtgggaggatcacttgagcccaaaagtttgaggctgcaatgaagtatgatcatgccactgtaccttaacctgggcaacagagcaagaccttgtctctaaataaataaataacattaaaaaatttttaaaggtaaaaaacgccatccaggtgagacagggtcagacccacctgtgaactcactggatggggggccaaactgcaattttctgaggacctattttgtgctaagcacatttgttcccttctttaatcttcagaacaaccttgtgggattagcagtattggccccattttacaaatgagaggactgagacctaagtccacacagacagtgggtagtggagctgctctgccagactccagtgccttgtatcctgtgcgtgcagaaagccttgcttggtgctggggtccctggcagggcaggcatctgggcatagatgctccaagcagcacatggctggaagtgagttccaaggcagctctgtggggccctgaactgacactagggacatgtcatggagcggggtagtctgctatgctgacggagcatctcttcattcatgcgttccaaggacatctcttgagtctagtccctgctagtccacacccttcctggagcacacaggcttggggagggacagatattatacagtcacccaaagacatacacagaatgaggagagactccattggtgcagtgagggaaattaacgtggtgacatcatgaagatgaaccggtaggagacctgtgtgacatggcactgtccaagatggccctctctaaggagatggcacttgagctgagacccgaaaggatgacgtgcatccagccgtgctggacagtgctcatgtaacatcgttgctgttagcaggacaactggggacaacccatttgtccatcaccacgggaccagttaaagccattttactgcagccacaccgtggcgcctgctacagctgttagaaacggggccatggagctaaatttattattgcataaagaacttcatagtgtgtcgtagaggtttttgtttttttttttaaaaagaggttataaaacagcatgggtagcattatatcatttctgtaagaattatatgtgtttctggaaactgcacagtgctcttcctgggaagtgggggcatgggtgatctttgcttcttctttctacttttctggatttggagtctttcctgagttttaggacttgtggggaggaacagaggattttagggttcccaccatcttgcctagggtacttcttctctcctgctacccacctcaatgggataaggcatgggctggggaatcagcagatctgggtcatccctttgactgtgtgaccttgggcaagtcactggccttctctgaggctgagtttcctcttctgcaaaacagataagaatagcgtccgagggtaggtgtgggcttaagtgagtagaaacatgtggagggctagggcagtaccaggcttgcatccctgacggtgctgctgctgttatgactgtgactgctaaaggtggcacctaccgtgtgtcggcttgtcctgccagggctccccaggcttacctctccctccgtcactgggagtcagacccaggtaggagacaaggcccagggtgggctttgtcacattgtcagcttggctgggcacaaggccagctggacctcaggtcagcaccaacccacaccccgcctctctccccaccacctccctccccatcacctccctcacatctgccagtgagcatccttgctagataagctgtgatggggacaccctggcccaggatttgctttttttttttttttcacaactagtatacctgcccaggaaaacagatactactttacagccactaagagaatcttaaatctcaggcagaacaacgtacactcgtgaagtcaaactctctgaatcatggaatcttagtcataaataatccggcaactgcaaacatatgcattttgcaagtaagttcactgcacctttcttgattacagtgataaattagaaacgacccaattctctgtttgtgagagttggttaaataacttacatccggccaggcaatgccattttccgcagctatagaaacagtgctgtaaatctctatttgttgacatggaaacttgtccatggcgcattgttggggaaaaacaggaggttaaaaattgatgtatgttgtgtgacatccggatttggaatctttcctgagtgttaggatttgcagggaggaacaggatatctacttaggtatctactgatttttttttcacttttgttatgaaaaatatatataaacatatgcgtgctcctgcctagggagatgctcagaagagtagtcattaaactgttgatagtggcttcctctggatggtgagatataggtgagctctattttgatttttgtttctatcattcagagttttttcaagtaaggtgatggaaaacccaccccaaactagtttaaacaaaaaatagattcgattgacttgtaactgtaaagttcagaggtctgatggcttcaggctcagctggatccaggacctcagggccaccaggacttgatttctgtttctcaactctgggttgtttccatgttctcattaagctctcatgtacaggtaataagatttctgtccaaagaaataagcaagaattcttccctgattgctcaaacacaagtcccagaactaagtcttggccttgatttgtcaaatttgtgggatgtgcccacccctcaatcaattgctgttgctaaggagaatttggtgctctgattggcagcctgggcctgtgtaccatccaccaccagctgggggtggggtcaataccactggaacctcaagagtggagagtggggaaaagtggcttccccagaagtagatgtaggctatgacctaaagtagaccaaatggtagccaaacccagcaacccccacctcctgtaattatctgaattgcccaagatgcatggttttcaaaatcagaaaaaaaacaatgcaactattgaaaggagtcctggccaggtgcggtggctcatgcccgtaatcccagcactttgggaggccaaggcaggcagatcacctgaggtcagacaggagttcaagaccagcctggccaacatggggaaaccctgtctctactaaaaatacaaaaattagcccagtgtggtggccagcgcctgtaatcccagccactcgggtgactaaggtggaagaatcgcttgaatgctggaggcagaggttgcagtgaaccgagatcgtgccactgcactccagcctgggtgacagtgagactgtctcaaaaaaaaaaaaaaaaagaaaaagaaaataaaggagtcttgaacccagatcttacggtcagaagctcactgaggcagccttcgactttcctggagtcagaacattggaatttctgaagtaccgatttcactagggagacatcaaccctctctgtcctgccagggagctgtcctggccctccaaatgactgcagtctttggaggagaggggagcacatggatgatttgtctggaatgtgagaggtgctaaggtggatgtgcatataggggctgtgggaatgaaaaggccagcctggggacaaggaagaggcttcttggaggaggtgatgcctaaactgagtagccaaccagagtgctggaagaatgttgtaggcaggaaaaacaatgtgtcaaagtcccagagcatgtggtgggagtgcaactataggatgagaggaggcaggcccggaccacaggggccttgaatgccagggtaagaacttggacttgatcctgaaggcagtggggagcctttgggggatattgtgggatgaaggaagtgtcagtgagctcactctgccttgtgctggaagcatagcctggaggagttagatcaaggccccacatggggaacgagaaaaaggacccaatgcccctcaagggagccttagatatctaatggtctaaattccttcccaccctgagtcagaattcctgtcctgagatgcccagccactgcttgcatacctccagagatggggagctcactctccattttctgcactgctagttagaaagctttttcacaggaccaagtccacaatcccggcactgcaggctgtcccccaaatgacctgctgggagggcaggcagaagcctgcatttccaggtcaggggggtccaagatgaggaagccctggatgtctgcaaaccctgctgggagtttgaatggagggcagagagagtcccattaccttgacagtagaggaagtgtttaggcctttagacatacatctgctgcttcagccaattttacaaatgccccttgcattttacacagaaggaaactgaggctcagagaggccaagccgcctatgtgacaacgcagagcaagttggaggcagggctgggacatggacccagcctctcccccgcctgtcccttctgtggccctgctccttgtctcctgccaccctgcaggtgggagctggtcacttcatctgcttgggtttgggcagcttttttctggaaactccagtcattgccagatcatcccctgattctcttctaaatcctcaaatgttttgtgactgttttgagagcagcattttttgtttctgatatagcaaagttatgacttgcacgagctgtgttttatgggtcatctccaatactttatcatgccccatggccttcatttagtcattcatccccacactccacagacatttatcagtgcctaccatgtgccaggtgctgcactagacctggagctacaaggacgaatcagagctgcccctgcccaggggaaattctcaattcagcccaggagagaagcatctccatcagcgatgacaggtgaggcatgagatatgagaggtaagtgctgatcactcagggatctctggagccaaagcagttgattctgttcctccaagcagtgttgaaggatgaatagggattctccagggagaagcaactgggaggggctctctgaagatctcacctgcctcctgttgagcttttaggcaggagggagtgagggatggtggggagacacagggctagagaggtcgaccaaggctggagcttaaaaggcctcaactgttgggctggggagtttgaacttgacccttaaggtaaaagggagccaacggcaggttaggtctgggtgttggaaagatcctggctttgcccaggagctcaaggctgcagtgagctatgatcccaccactgtactccaccctaggcgacagagcaacaccctgtctctctctccatctctggacagtgtctctcgatctgttgcccaggctggagttcagtggcgtgatcagggctcactgcagcctctaactcctgggctcaagtgatcctcctgccttggcctcccgaagtgctgggattacaggcttgagctactgtgcccagcagagaccctgtctctttaaaaatatttttttaaggccaggtgtggtggctcatgcctgtaatcccggcactttgggaggccaaggcaggtggatcacctgaggtcagtagttcagtggccaacacggcgaaaccccatttctactaaaaaatacaaaaattagctgggtgcagtggcaggcgcctgtaatcccagctactcaggaggctaaggctggagaatcgcttgaacctgggaggtggaggttgcagtgagccaagattgtgccattgcactccagcctgggatacagagcaagactccatctcaaaatatatatataattttttaaaaaaataaatcaagatcctgggctggtcttgggggtgacagcaggtaggacaggaccataagaatggcacagagtggcgtttagcagggagattcaacaagatttggagactgagtgctgctcaaggggagagagagagttaggagggtgatgtgggcttgggggccctgtggaccaatgttgaggtgaatgctggcaaagcttgggtcagtgtccccaggtggagcccgcagggacctcgtcagcttcgtgagacttagagcagcagcctgatgaggcctccagggtcccgcgtctcttccccttgtggagcctcagttttctcctatgtaaagcagaggtgatgatagtgctgccccaggtgttgtggggaaggtgggaggagagcgtgtcaagggcaggttctccacggtgcctggcacataggaagtgcttggtgacgggaagtaattctggttaccacggtccaggggcagaggtgggtgagagagctggctggcactggagctccagatcgccacctgggcaactgtgtaaggacctggagtgtgttgcctggagaagggaaaccagagaggggcttggcttcctgcctttccatctctgttggaggaggcagggtctgggtctggcactcacaggaaaagctccagggaaggagatcccagcttaggctaggaaaaccttttggatacaaagaattctctgcagatgggctagcttgggtgataggtagcgatctcctcatcactgagagtattcaagcagcagctgcaccatagcttggcagagagtctgtagaggatttgtgattcagctgatgatctggaaggtcctttccagcccagagagtgtgtgatttcaggtccttccttctctgaaccttggtttcctcatctgtaatacaaggataacagcagcccccatcttagagttggttgcaaagtttaagtgaaatcatccaaataaagtgcttaacccagatttggcgcatagcaagcgctcggtgaatggtggctattattactgtggatgttgcgctagattcctgggcgtgtcacttccatctgagagcctcaggcgcctctgctcatcagggtgctcctgcctgcctgcccttcgggacccactttctgcccttctcattgccaccgtctctgtctccagctcccccttcaacctccctgggaggtggtaggatttccagacccttctgggccccttttagctcccacttgagcaagagttggcaggttggggcggcggatgccatccgcctcccatatgcttcctgctatttagaggaaaactctccccgcgttcctccaaccacacgggctgacatttccagacagacgctggaatcagctcttcgggggattggcagataaatttggcccaggcttttgggaaaatcttcagccttactgaggaagcggagcccaggctcaacgacttccgtccaccctgctactcctcgggcctggtccttccagggggctggagcactgttctacagccttgctgattagggtaagtcttaccagcccagctgtcccccaggagagcccctggggaagttgctgcttccagcctttcactcagaggcagcaggagttgcaaggggaagctcctccccctacgccaagacacctgggtgttaccctactcaacctggcagaggagcaggtttgggacggtagataccaagctccagatcacttcctgtctctgtgatctcaggtgactccacctctctgagcctctttttcttcatctgtaaaatggggataataggaggatctgtctggttaaaagccttagggtggatggtgcctggcacatgctaaatgcacaacaaatactagccactagtattatcatcatccttgttatcattattatttgggctagaacagcgcctagcacttaatatgggctcagtaaatgttaatgttttttcccttgtcctttcctacagctgtggctactcaaggaataccagggcatttcagacttagctcagattggtgtaaccagtggcagaaatgcaagagtaaggacaggcagaggctgccacatccagggtagaatgtagacaccagtccctccatacacacagacacacgcacatgcatgcacgcacgcacctgtgtcccaaaatctcatgcatcccatctgagtctggagttgccctctgcttggttttgatgggcgaaagggaagaggaaggcccggcaaggcctgggctctctgcaggcctggctggaggcagagtgcaggagacgcttgagtgtcagccacagtaggagggttcggggaagctggagtaattctatttggctggagtagaaagtgggtggtgggaaggcgtgggaagcaagtttgagcttcattcagcacctcctgagtgagcccaagtaccgggcctcgtgccagggactggggaagtggttggaaaagatgggcacgcttcctgccctcaacaagctctggttctgggacagggaggcagtggcaaacatgctagcagtaagctagcgacactctgggtgatgctcaaatagccccaggtgccaagagagagggggccacaggacagtggtagtgagtaccttccagagacagggtggtcagagaggccctctttgtcctctcaagcacacactggagctggccctgcaaatgctggatgggtaaagtggcgggaggcagaggaggcagcgagaacaaaggttgggaaggtggccgaagccagaccctggaggcctcgagggccaggcccatgggagatgctcttgagaaagactattctggtggtgggtgcgggatcctgtcagggggaagagatggaaccaggagacctgtctgcagagatgccttgagcatctgccgcacatgctgttggagcagttggggggaattctggaccagggagaagtggatgagcagagagcatctcacagggtcaggctctgagcggaatcctgggactcgaggcacatatgttttgaaaggaggatctggacctgtgtgtagctggggtggggtcaggtaagagagaagacatcagggaaacttagacccagacctcagggtagtcaggaagagttttagaggagagcctggtgctggttgtggggaggggcttcctggcagcctgggctgcaggtgggaatgacagcacacaggtagagtgagcacaggcttcggcattcggcccagtggccaattccagatctgcttccttgctctgtgactttgggaaaatcacttgacctccctccctaagcctcacctgttctaataataccgaatcagttgaaattgcatttagctgcatgtaacagaaaacaagtaacatttgtataaatacccagaagattattattcttatgtaacaagaatctcagggccatggctcatacctgtaatccaagcactttgggagaccaaggtgggagaatcgcttgaggtcaggaatttgagaccagcctgggcaacatagtgagactctgtctctacagaaaattttaacaactagccaagcatggtggcaggcacctctagtttcacctgctcaggggactgtggtgtgagaatcatgtgagcccaggagttcaaggatacagcaagttgtgatcatgccactgcattccagcctgggcaacatagcaagaccccatctctacaaaaaataaaaattagaccagcctgggcaacatggcaaaaccccacctctacaaaaaatacaaaaaaaaaaaaaaataaccaggtgtggtggtgtgtgcctgtagtcccagctacctggggggctgaaatgggaggatcacttgagcccaggaggtctaggctgcagtgagctgagatcacaccactgcatccagcctgggtgacagtgagaccctgtctcaaaaaaagtaaaaataatttaaaaaataataattagccaggcatggtggcacattcctgtagtcccagctacttgggaggctgaggcagaaggatcacttgagcccaagaattcgaggttacagtaagttatgatcatgccactacactccagcctggatgagagagcaagaccctgtctgcattaaagagagagagagagagagagagagagagagagagagagagagagagagagagagagagagagagagagagaatctcagaggcaggcaggcaagccagggccagtgcagtgattcagatgaaacatcaagggcccaggcctctgacacccttagcatgcatctttcattctcatggctacaaaatggctgctcctctgccatgtgctgcatctgaattctagacaggaaaaggagagtaaagcctgcatgcttcgcgagtttccttttcctaccagggaaacaaagacttcctggaagccccactttgtggatttttgcctacttctcttttgccagatttggacacatggacaccctagctgcaagggaagctgatgaagtgaatatttctaactgagcccttctgttaggaaaaagggaagaatagctagcaggatagctagcatgatccaccttaaagtacccacctcacagggaaagattctaagagatatttaatgtacataaaataatcggcaacctttcaataaatggtggctgcctttattctactactctacctacatgtattcattcattcattcagcaagcaagcaagcatatattgtgttttgggcactgaacacagtactgcacatgacagtgacagtccctgcccctttggcactcacaacagatagggaagatgggcaaggaaacaaattcactctacttcaatcagtgtcaaaacagaggatttatttttgtctgtgttttcttaccactgtggtttctccacctaaagcaatggctgggacacactaggcacaaaataaatagttattgaatgaatgagatagttcaagaaatacccactagtggcctaccatgtacaagactctggattggttagagaaagtgggtgacacatcatgcctcccttcagaagaagcagggaaagaaagtcattttatggtgaacattgagatgggtgctggggacctagcagtgaacaagaatgttgtgactcctgtcttcattgagcccccagtctaggggcagaggcactggaggagtctagagtcctgagaacattctgttcaggtgtcctggggtaagccccttcccttccccgggcttccatttccttacttatatgacaggtatgatgggtcctggtggggctatcgctgatgctggtgatgatggtgggtgtctcataagctcttctcctctgtatgtgtaggaggctgatgtagagctgggatgggggcttctccttgccatgttaggagaagagacacctgtggcagcgatgggagtgggctgcatctgatccccttggaatctcatggggtcccaggagagcaaagaatctgggccttgtttccatccttgcccaccccagtgtctgagtctggcagcttgttgacagctggccagctgggcatggagcatccagcactggatgttggcaagcagtgaatgggctgtgctgggtaccccaaggtgagaagtgaggatgattgcaattatgggagatctggaggtggagaagcagcctggaatttgagggcagagatctggttttgtcacttgtttggctatgtgacatttgagacatttcttggcccattgaaaccttggttttccttttctttttctgagatagagtcttgctgtctctcccagactggaatgcagtggggcaatcatagctcactgcagccttgaatacctgggctcaaataatccggctgccttagccactgtgtagtggctgagtagtgccactgtgcctggccttttttagggggtgggggtggaggggcagggtagagactgagtactgctttgttttccaagctagtctcaaacttttggtctctaacgatcctcctgccttggcttagttttctttttctctttcttttctttctttctttctttttttcttttttttttttttttttttgagacagagtctcactctgtcacccaggctggagtgcagtggcacgatctcggctcactgcagcctctgcctctcgggttcaagtgattcttctgcctcagcctcccgagtagctgggactacaggtgtgtgccaccacacccggctaatttttgtatttttagtagagacagggtttcaccatgttggtcaggctggtctcgaactcctgacctcaaaccatccacccacttcagcctcccagagtgctgggattacaggcgtgagccaccatgcctggctggcttggttttcttatcagcaaaatgggtataattgtccttgtcttgtctacccctcaatatcttgacctagcacatagtagacactcaacatgagcagtgatcatcattgctatcattacattgtccttgttgggaagggggaatgtttactaagctgtttactaagccctttttatgtgccacacttggtgctggtcacaccatcttaatgcaccacaactctgaggaggtggccttcttcccatgtatcagaggaggacactggtattctgttgtgccccatcttccccttaggctgctttagaagcacagagttgctggctccgctggggtctccactgaactgaagtcctgagggtccttaaagaagggctcaaggcagctcaagctgtttactttgagaccatgtgggcagccagtgatatcagagaggtgatcagggcagaaataaatctagccctcatcaaatgggcaaggagccaataaaagacggcctcagggatgagtgatggagtgggacaggctgaaggatcagcagtgtttctccttattcactgtcttgagaacagggcaacaagcccagcccttgagatgaggtggcattgggcttgtcccttgctgctgcacttggctgtaacactgtatccagtgaccgtccctgcttgtgtctgaaatgaagccagtaggttaaaaagggaaggtttgggaggctctcttggcctatgaagatgggttttcctagtcaagaacctccagaaagccttcctgagctaccccaatccaaggaacttcacggggtgagaaacacacaggaaaactggtctctggaatgaaagagatgcaaatagaaatagacctggaaggccgggcgcagtggctcacgcctgtaatcccagcactttgggaggccgaggcaggcggatcacgaggtcaggagatcgagaccatcctggctaacacggtgaaacgccgtctctactaaaaatacaaaaaattagccaggtgtggtggcgagcgcctgtagtcccagctactcgggaggctgaggcaggagaatggcgtgaacccgggaggcggagcttgcagtgagcctcatggcactccttagcgccactgcactccggcctgggtgaaagagcgagactccgtctcaaaaaaaaaaaaaaaaagaaagaaaaagaaatagacctggaagtagcttctcagggccttactaaatgtggggcaagtaactagctagaaaaaaaaagaagctttcattgccacctcagcatgggggaaggggattttgacactttgacctttgagctgtgctgtttggggtgcggggcactcgtttgcctctgtccttagtgctgatgtcaggggtgttgtccgtggtgctgaagatagagagggtagagatttggcctggtcccgacgcctgggggtgctgtcctcggttctgtcttgagagttttcatgaatcatttccaggactgtgtggttttctggggacccaactgggaggtcagaagctttggccctggcattgtgcaaatctgagcaatatctgaggtaggatttgagcctctgttaccatctaccaggcacccttttaataactttggatgtattatgccatttatttctaagcagcaacctacaggggaggtactaatatttattcccatgttaaaggtgagcaaactgaaggttagagaagttgagtgacctggggactgtatttctagcctcaatttcctcagtcataataggaaggttgttggtagtgtaacacaaactaatgggtgggacagggctttgtaaactgatgcacagatgtggtggcattagtcttacacacggaggaaagcaggagtgaattgtcaaatgcagatactcttggaacctcatagaacttcctgcaaagtctgaggtttgagccagaaaggaaacaaggagatcaggggtggtggtgtgtaaggctcagagattgtgtggaaaagaagaaagtgcccatttactgtgtacctactgtgtgccaggacctgtactgggcacctgacaaacctggtcactctacctgcataaccacattggtgaagagcaactggtttcattttacagatatggaagtggaagggggttacttagctaggaggtggtgttgagaaaggccttgagaaccagagacttgagtatctaatcctgggtgtcatctggtccagcccagagaaggggtgtgacctgctgggggcatgctaagttggcagtaggactcaggctggatttggcttcctttggtgtctttcctctcctaggaatatggcaccaccaccctcccctcaccactagccccacgaagatgaggaaatactgttgtgtcacaaacaggggctgtgtgtcagagacccaagattcaaatcctggatctgctaactgtgagctgtgtggcctcaaacaagtcatctaccctctctgggcctcagtttttccacctctagcttagcggaagagcacggtaatcactgccctgtagatggttttcaggatcagaagagagagtgggttgaaaagggctggcaggttagttcttagtagtagaaataagacccagaggagggaaagactgccccctacacacaccccaggaagcacagcaagaagcaaaagtgcaaaagggcctagaactgatgccctgagccaccaatgccatttcccagcaggactagtaggcatggctggggcagcacctggcagtcccagctgacagacattccttcgggcaggcagtctcaagccccagagccaagcatccttgtggggggtcagtggccaggccagctctggctgttcctccaccagcctccctaatggctccaagctgcatacgcctcatggggctgctgtcatgcctaattaggctgtcctcagccaccctctctccagggccctgttgtggccatttgaggctctggacatgattatggtggctgcccttcgcagctgtttggcttttggaaggaggtggccacctgctctcatgattacctatggcctaagagatctgcctccccacttcagcccaggaggcttagctctgcagctctgggcccagagatctagctgcaccctcctcacacaccctaccctggctccaaagcctggcactaaagcagagtgaagaaggaaaggagaaaaagatggcaggagtaatagagagaacaggagggaaaggaaggcgggggcctcggcaccaccagccagcctcctcagcggaggctgggatcacttaggagacaaagcccacctcgtccacactctcccctgaacctttcagcagcccatgcagccagcaggacacagaaccagagagcaagcaagcgtgacacattgtgtgaggtgagagcttagtgtggggccagggtcaggggtcattctggggctcaaatcataggggagttccttgcatagcaaggatagaagttggggccttgacctcatgttcagcacctgtcagcacagagcaagcatgtttgctgaaggaaggaaggtagagagggaggagggaaaaaagggagaaaaggaggaaggaagggaggaagggaaggagggagaaacaaagaaggaaaggatggagggaagaaggaagagaagaaaagagggatgggggagggagggaggaaagaaagaaggaaatactaaaaggcattccatgtagagggaactcacaaacccaaacccaggggtgttgtttgaacagttttctttttgggttgggggaagggggagacagggtctcactctgtcatccagactagagtgcagtggtgcaatcatagctcactacagcctcgacctcccaggctcaagtgatcctcccacctcagcctcccaagtacctgggggactataggtgtgcactaccatgcccagctaattttttatttgttgtagggacgaagtctcactgtgttgccagggctggtctcaaactcctgggctcaagtgatactcctgctcagcctgaatgattttcttacataaattatatcataatcaattaatatatttgcatttttcttttttcacttatttttgagatgtatacaagtgcagctgtagctcgttcattttttctgccgaatagtattccattgtatgcttataccacatcctcctgccggtggatatttcagtggttctggttctccaccatgaagatctctgtgaatatgcattagtatttctctggaagcaggattttctgtgttaataaacactgctaaagtgccctccaaggtaattatgccactttgcactcctgttagtgatatatctgagttctcatttcctcagcacctcagcatcagttgattcatcgctctttaattttgccaatctgctgggagaaaatatctcattttcattagcgtcgcctgactattagagaagctgagtgtctcatgatgtgtttagcggtcatctgaatttttctcttctgcaaaatgcctgttcatatactttgcccagttttttatgcgtcacatctttttcttattaatttgtaaagaggtttatatatgtgaatattaatccttgttatctttgtcgcaaatattttctccaagttgtgttgcttgtctgttaactttgtgtcttctacattcagaagtttaaactttgggggtagtaaaatttattttccccttcacttgcttttatttctttgcaacttctttaagaaggccttccccacccaaggtcataaagataattctagatctcttctaagtattttcattttatttccttttgtttcatattgagatatttaatcaagtttaggtcttttatctttgcatgcggtgtgaaatagggatctgatttcatttttctatagctagcctattgtcccagcagcattaattgaacaccctgtccttttctcactgatttgaaataccatctctgttttatgtttaagcgcccatgtatttatggatctgtttctgggaactctgttctgtttcattgatctctttgtctatctctttgtctatttcggttctacactaatcactgtatctcatcatttttcaacagggacatcttggcatttggggtacaacaatccttccttgggtgggactgtcctgctcattataagttcttgagcacccgtcatccagtccttggcactcagtagaaccctcccctgagtgagtgttatgaagaaaaataccctgagcgagtgttatgaagaaaaacacgtttgcaaagtcgccctaggagggcagtcccttggctattgagaactgccacagatagctgtattatgtggcttgatatctggtaggacaagcctccccgtccccacttcttgattcttcctttgtatgttctcttcgcactctgctttgctgccatcagtggaatccatagcatgacactgtcaggcatctctggagatgggactcccatcaggcaaggcagcccactcctttgtgtgtgtctgtctggggcctgattgttagaaagtgctgtcttacactgagctgaagttggcctccctgtgtcccacttcctccccagctcctggagcccccagaacacacgtccctcccccgtggcccacccttcattgacctcagagagcagacatttcccctccacctcaactcttttctctagactcccaaactcaataaccccggttccctctgatgtgcgtcaaagacttggcttagtggcaggcagcgtggtatgtttgaacttgagtcagacacattgagttagaattcctgctcacttacctattagctgtgtgactctgggaaaggcagttaacctctctgtgcctcatttgttaaattggggtaatagaccctctacctcagagggttgatgagagatgtaaatgattcggagcataaggcctgagcctggtgcaggtgcccaggaagtgatagctgttcacacttttcctgcgattattacttcttcatgatgctcctggtcactgttccatgcctacccatcagaagaggtgtccagagctgaaaggggcacccagatgggctctggccaggataaggaccaccattgcatcctctgcctgagaaactaggatgacaggatttgctgtggggctggttgtggggatgacaaagaggagtcagggccaagtccagagttttggtctgatccattgtgagggtggcgctcccatcagtgggaaggagaagaccgggaagagcaggtttgcagggtcaggagttcaggtttagacatgacaagttggcgatgcctgttagacatccaagtggagatgttgagttgaaaattggatatgtgaatctagggtttgggaggagggaggattccaggcctgatgtgtcaatgtgggggtcatcagaccttcccagaccttttcctctgctattgcatagacgtagttttattctgagaggtaggacagcacagtggttaagaaggcttgttctggagtcaggtggttcgagtaccagctctggctgtttctcactgtatgtctgggacaagttacttactttccctgtgcctctgctttcccatccaccaaatgggtaacagtaatgcccatctctcccttagagatgtggtggggattacaggagataatgaatgatgccaagtcatgggcttacctgagacctgttgcacgctaagcactgtctatatgaactctagtaattatcatttttagctgtgagtctaagctgtgaaggtttcctgattgattcatttgttccttttcttcctctctctttttaaaaaaaattaccttacataagtaagaaaaataaataagagaaaaggagaaaagaaaagacaaaacaagatgattctaggttatactttattaaaggtaggctataaatttgcctctgagcttcctagtagacaaagaaaaaaaggaaacaagaagtagcatgattcactgtgcccttgaaaggaaaataagtcaattaattgctcaggtgtgtgcagagtatccatgtcctcagagccattcatacagtaaatacagtaacaacaggggctgctgctatgactctagtccccaaaggctctggggttcagaggggccatgactggtactctggaggccatgaaaccaaagcatgggtggtggaggctgggctcctggccttctaatgggggaaacagccaggaccacacctatcctgctgcgtggcagcatgggctccaggctgaaataggggcagagaagtgtgcaaactggaccaaggggcagtgaacttcagctgggagaagacatcacagaagacatcatatttggcataggccttgaaagctgagtaaggctctgacccctggagatgacaatggaggtcctgagttccccatcagacccagcctgagaaggagcgtcgtccacagcctgttacagataaagagagcttagagattcaagttcagctgcactcccatgataggagaactgaggcccagagaaggcagggctaaacctggagtcacacagagaggcaggaacctagcaggcctcaaacccaagccttctgcctctctgaccaaagctagttccccttccttaccctgactacagcttctctgggttctgactcgcctcctgcagggtcattaaccacctactgcctgccacatggtgtccccctatatttaactcccacgctgtgacttacagaggcccagaatagcaatcctgagtgggggggcatgcctccactgtacccccctctagtctaactgaactgctggtcacagctcccttctccaggagagagcagggtcctggatcctgggtctgtgttactgcaagaggagaactagcttgtccctaagtaagacttagtataaggagtgaactacccacttgaggaatcctggatacacactgagccctgaccctggccccagactgagccttgatccctatccacagactaagccttggtccctgcccccagactgagccttgactttgatcccagactaaaccctgaccctggtcccagactgagccctgatcccttctctaggttgaaccttgaccctgaccccagactgggacctgaccttgatccaagactcaactctgacctcttcttcaagctgagccgtgaccctggcctcagactaagctctgagctctggccttgacccagatggttggcagttggggacatgaatagttgggactccttctccccctttaaatgctagaaactcagctgaggggccccacccccatttaggccagtgactcagattgtgccctgagggttctatctcagagactgcccccgacaccctggcctcagctgcagtggcctggggacctatagccgtgggagatagaaccattcaggccgcccactctgaccatgaactcctctgcaaccccaaacaggctgccagcacagctgaaagctctcccgccccttctcctaatttgcctcctctctaattctccaggccatgcgatctgtggtgagggctgagatatttataaaatctgtgtccttcatgataaagccagccccagggaccaggttcagagcagctctattcatcctttaaagcccaaaaacttcaaacgcacccaccacagagggccctcatcacagtcccacctgtcaccaattgaagtcccaccccctgcattttggaattgccttctctcttgtgcccaacactgttcccagcagccacaaaccctggctgggtggaagaagctgggacgctggaggctgacgacagctctgcttcctgactggtgtctcagatgagtcactacccagctctgagctccagtccctttgtcttgcaaatggaacagcgcccacccttcaccccccagtctatagtgctggggggtaggattccatgaggtgcaaagtgctcagctctgggcctggcagaggagcttctgggtgttaatgccgtctccaatgcaaccagtatcacatgagcaagtgggcaacacctgccatagctttcccatagcctgtcccagttcctgaaggtgcaccatcggggttatccagaaatctcagttaaatcacgggtcacccttgaggggaggcggcttaaggcttgtccttttggaggaattgcagaggcttctgggagtatccttaaactcgccctgacttcacttggtgggcctcagggcctgggtgataggcagggagtggcttggggtcgtgtcccgaacagcagagggtggtctggttcagagtgaggcagcagggatggaaagccagtgagctggggggcaggagctgttggagcaagagtgagggagccactcggcttccagctcaggtgctaggggctgccactaggagagagacaggagaggagcaagtgtgtcagaggaaatctggaattcagctcaaatgcgttgagtctcagatgtctggccagcaagcaggagagacagccaggaggggttagagccttaggattgcctgtcattcattcactcatttgttgtttgtttgcttgttttggggggtattttttgagacagaatctcgctacgtcttccaggctggagtacaatggcatgatctcagctcactgcaacctccacctcccagattcaagcgattctcctgcctcagcctcctgagtagctgggattacagcatgcaccaccacgcccggctaatttttgtatttttagagagatggggtttcaccatgttggtcaggctgctctcgaactcctgacttcgtcatccacccgcctcagcctcccaaagtgctgggattacaggtgtgagccaccgcgcccagcccattcactcatttgtttatgcattccttcctttgacagatatttattaagcacctactaggtttcaggtactgtttcaggccccaggctattgtaacagacgggacccaacctcaactttcctgaggttatcagtctggtggaagagatagacaataagtaaaataaacgaacagatgctgtgctcctgggtgacatgggagtgaggaagggggtgagagaggtgtctctgaggaggtgacacttgggctgagccctgaatgaatcaagggagaagccacacgagggtctggggcagagcattcctggtagagggaacagccagtacgccctgaggcaggaaacaggaggccagttgggctgaggactgggaaagggaggctgggggcgggggaatgggtggggtaggaatgttcaggaaggaatcatgtggccttcatgaggggtttggttttggtcaagagctcaggggtgagactagggtgggactggagaactgggagtcattagggcagaaggggtggaagggggtgattcaaatcccaggggatgaggtgcattggggaggtgactgaatgggaacacagacctaaccaagagcctgagcaagactggaagtgcctccttagcctggggtcagagaggcctgggtgagaaccccaagctctacactccctcgctgtgtggcctagggtctcctctttgctgggcctcagcttcctcatctggtaaacaataaaattaatccctgtcccccggctgctaacttacgaagtgctgggctcctgggagacgctctggggtctggaaacccagccctcttggtaagctgggaagtatggggctggcctggatttctggacttatttcccctgaggtctccacaccgagcccctggggagcacagggaagcgagccagccgctgtggagactgacccaggccagagcttgtcccagccccagcccctttagagagctgagaaccaaagtgagaaactgaggccgaccctggcacttaggagggaaggaaaggggggctctgtgcctgcaccctttgtggcactttagccatattgtcttggaattagacatagattggggtcttcattgttcagatgaggaactgaggctcagagagggaggtgacctgcccaaagtcacacagggagtgtgtgcgttccaaccctagcctgtgtctcggccagccctgaggcagctgaggagggggctcagggactcatccctcgcctgcccacagaatgcgccccaggccctgctgtacacacagggaggtggccttcacagggtgccccctccctcctccatgccgcactggcctgccttctatttctcagaacctgtgaatctttttccagcctcaaggcctttgcacatgctgtcccctgtgcctggaaaattctctctctccctctctttcacatacacacacatatcatcctgtcaattcctactcatccttcagactttaggtcagacctcactttgtccgtgtgaagtgctctcctcagcccatctaccccatctcccaggctccaggggctgctgtcaccgttatccgcccgtgtggttagatgtttatgatctcccttccctgacaccctggctggggcctatcacagaacagggcctgaggaagcgctggctggatgggtgcttgggccactgccctgcgactctgccctgcgactctgccctgtgggggtgtgagctgcagggagtacccaggagccctggccccactgggtgctgcccccttccttactcctaagacggactccatggtccccatctcccccggggcatgacgtcagtcattaagtggcttctgcagtgagccggggctgtgtgggctgtggtgcgtgtgtgtgcacgtggccctgggtacatgcacgtgtgcgcacgagcctccgtgagtaattccagcggtgcttccccacgctgtcgccatggagaggctgctcccacccacccagccccaggtggctgcctctgccaccctttccggtccctctcccagcctctccatgacccagattcgacctgccttgcctcccacgttcacaggctctggcttctggaagctcagggttcaggggcctctccctaagacacacctctcattcaggatgggctccaggttccagcagtgcttgtggaggccacgtggaaagagagggccctagcatgccactgcctgggcgggcacctgactcctccacccagattgtgcaacctggggataaaaatgcctcactgggggattcagaggctctgctgtggccctccaggaccctccctagagctgccccctcctcttttagcctccccgtcgttctctctgctccagccacaccagcctccttgcaccagtcccttcacccaacacacacacaccagctgcacctccattccacattcaccattcctctaccaggaatgccctttccccaggcatccacaagacccacccgtcacttctgcccaaatattgcttttgcagaaagactttcctgaccctatcacactgcattcttctttaccttctctaattggcttccaagaaggtattgttgcatgacattatattatatattcatttacctgttacctgtctccccagctagaatgtaggctctatgggggcaaggactgtcttctttgctgctgtatccgagagctttgagtgcctggcacatagtaggagctcagtatccaaatatgtgttcaatgaatgcgtgaacctaaagcacttagcccagagcctggccctcagcggtcagcaatgtagttatcacagtcagcactgccttttttttattattattattgagatggagtcttgctctgtcacccaggctggagtgcagtggcgcaatcttggctcactgcaacctccgcctcccaggttcaagtgattctcctgcctcagcctcctgagtagctgggattataggcacatgccaccacacctggctaatatttatatttttagtagagacaggatttcaccatgttgacccggctggtctcaaactcctgacctcaggtgatccgcccgcctcggcctcccaaagtcccggacctggccagcactgccattctcgaccatgctcagagcaggggtgtggcaaacattagtctctgtgctggatggtcacacatatttgatcgcttatggccctcaccatcaagtccatgagagagatgcagttattactcgtctcattttctggataaaggcatgaggctttaagaagtcccagaggtccctgagactggctgggctgattagattgaggcccaggcctgcctggtcccagcttccaaggccacaccagctctgaggagcccacctgcacacacagcaatcttgggaggcccattgaaacaacatcatggcagtggggactctcgtccactgaggagggaagcaccacctccggaaaggctggagccccaaggtctagtccgaggttgacatcctcctactgggtgaccttgggccagcatctgcccctcagcaccgcagaagtgcagtgagtggggttacttgaccggcttgagacctcttccagatctggtgttcccacatctaagaggatgatcatcccaaacccctcacccagaacccagcacacacacacacacgcacacacacacacacataccacacgcacatacacacaccccacatacacacatgccacatacacacaccacatacacacacacacaccacatacacacacccacacacacacatcacatgcacacacacacatacacatcacacacaccacacacatgcacaccatacacacacaccacatacatacacgtgcacacacacgcacacacacaccacagacacacacatacacacaccacatacacacaccagacacacacacgcacgcatacacaccacagacacaaacacatacacgcacacaccacacacacacacaccacacacataccacatacacataccatgagggatagatggaacttttgatcttcctctggggtgattccaggggcctattgaagacttctcaccctgaaggcagccctacttagcctcagtttctccatccataaaacacgaaccataacgagccctgcctgccctctcagggcggttgcattcaaatgattcagaagagggagagtggtttttgagagctgtgcccttttaaagagtgacaacccaccatggaacaggaagttgacctgtgccccagggaggagtttctgggaagaaaaaccttgaggcacctgaagctgcagaggaagaaccatctttattcccatattccaggcaggtaaactgaggcttagatttgagacatgattatctctaagtggtatggagctggtaacaaaaacatcagtggggaagaaggtccctaaggggaagggcgggttcccttaacagacacgcctgaccttgtaagtttccctgaggcagccctgtactcccttgccatggagtaaggatcagtacacatggactcgcctgagagcttgttagaaaatgtaagttctggggtctcactccatttagacttgggtgagtcctaattcaggggttctgggaacccaacttgagaaacactgacacagaaacgaaatagcgagaaaccaaagctattctatccagagcatgcattcaactgacattcactaacagcccttccgtgtcacgccctggccagcctgcaggacccaaagatactccccagtgccataagggaggcatatgtggaaattggcaggcactcccacccttctcccttctttggatttattttggtgtttcttttctaacttttggagttgtttatcatattgcttttcagtttgtttttttcttttctttttttaatataaacactgaagactatacgtctctagatacaactttagctgcatccctcaaattttgatatattgtattgtcattatcattcatttctaagtcttttctcattttccttttggtttcttcctcagcccacgagttatttagaaatagatgttttttaaatttcaaacgtatgggtaattttcagttatcttttgttactgcattgtttctttggtattcgttgagattggctttgcagcttaaaacttggcaaattaggccaggcatggtggcttacgcctgtaatcccagcactttgggaggatgaggtgggtggatcacctgaggtcaggagttcgagactagcctggccaacatggtgaaaccctgtctctactaaaatacaaaaattagccagatgtggtggcgggcgcctgtaatcccagctactcaggaggctgaggcaagagaatcgcttgaacctgggaggcagaggttgcggtgagctgagattgtgccattgcactccagcctgggcgacaaaaaaactttgccaatttttgtaaatgttacatatgtgtttgaaaaaacacgtatttgctaattttggggttcaaacttttctctgttcttgatgtccagtgacaattctggtgtgttagagagaaccaagggctgtcggacccaagaggagattcctgatccggtctgtgtgtctcagggaaggccttctggaggagttactacttaaagatgtaagtgttaggctaggagacaagatgggaaaagcattccacccagagggaacagcatgggcaaaggcatggaggtatggagtaactcttggcaaaaatggaaacactgataaaatttgctaggaatcagggtgaggtaagatcagtctggtggaggtggcagggtcaaaggagtgatgtttatgagagaagatattactaacacagccgtagagaagagtacatcaggtggcaggagctgtggaagcaataataccagccaagatccattaagctcttattgcttgctaggcactatgctgaatgttctatgtgattgcctcgtttaaccccctttaacagctctgtgagatagataccattatctccatttatagatgaggaaatggaaaccagagaggttgagtaacctgcccaaggtcacacagctccaaatggtagagtcaggattggaagtcagccagatacagtctgactctggctcccacattctcagccactatgctgtggttcctgggtatgatgggagttgctggagaataacgtgtggctggctgtgactggagcttggattacctaatacacagcaaggctggccaggcgcggtggctcacacctgtaatcccagcactttgggaggctgaggcgggtggatcacttgaggtcagcagttcaagaccagtctgggcaacaaggcaaaaccctgtgtctaccaaaaatacaaaaattagctaggcatggtggtgcatatctgtaatcccagctacctgggagcctgaggcacaagaatttcttgaacccaggaggcggagttgcagtgagccaggaggttgctggaggttgcactctagcctgagcaacagagtgagactctgtctcaaaaaacaaacaaacaacaacaaccaagaaaacaaaaacaaaaacataaaaagcacaggctggacaagatgagggctttacattcaagagaattgggttccagtgctgactacttcctagctctgtggccttgggcaagtcacttccacccgaagagccttggtttccttatctataaaatgagacccatgcccttgctctgcctgcctcacattctgtgtaagaaaaaataagatcatgcctgctttgcaatctctgaagtgctctgcctgtgtctgtcattgttggaccaacccagagagagctgggaatggccagccaagggacagaactgcctgctgccagcactggggagctatgggtgggccttgagctggggaggggcagggaagcctggagccttgaaagtgaagctaaagaacctcgcagacccttcagttagctctgtcaaattctgtaagtatttgtaagagttgaatgagtttcaactttgagccaagtttcagctcatgagctaattccagtgggttgcatagagtgcagattcgaggattccaggccttatcccatcaatgagaacgtgaggtttccattagttatgtctgccacaggtgtaggaaatacagctggtggtgagctctgaatctgctagtcaggctgtagtcccgaggctctcaagggcacagcagcgcctcccaggggctatttttgttaccacagtaactgagcaggggctactagcttttagagggcaggaaactggtaacattcaggccaaactttcacaatgaagaattgtcccagctgcgttccatgtgactttcaaatgtcctgccagccattcctgtaggcaaaaataacgaaactgaaacaaacaaacaaaaaacctgtttgtaactccctgatcctggaccctcactatattttgtatacaagcttgaagtacctttttacccagttttaatataccaggaatgtaactgtcatgaatgccaaagaaaggatgtgcttcttctgttggttcagaattttaccaagagttggtcaccattttggaaggatcatcccctctagcttgtggtaccagcgatatttgagcagctgattcaacagcacatctttctctgtctgcatttgtaactgtcacagattctgtgggtaggtgctggcatctgattccttcattacgccttcttgacgagttgtgtcccagcattgtgctttacaatatgagtcgtattataaattactttcctttcacttctcctttatatttcagttagggcattgtatgtttttaaattacgtgtgtaggtaggtaatatgatctatgaattttatttcaggagaataaaaggggacattacaaaatattttctataaaaatggcatttggggtctgagggggttggatggggttgggaacattgcagcccaactccttcctttctgatggggaaactgaggctgggggtggggaagaggcttgcctttgttcgtatggaaagtgggaggcagaacttgaaacatatactttaggaagatctttcgcactctggagtggggggaatctgggggcagaagaccagtgacgtgcctggaacaggggaatgggagtgaaggagggggtggctgtggcaatggcgatgaaaaccaggtgcggagtttcgagatgttttggaggccaccaggcagctgtcaccgggcgctggggggccagcggggaatcagaggtgaggggcaatgtgctttcttgaggaattcccccctttgccggaaaaactggctttctgtggctgggaacctcagaggaaatcaggccatcccacagagaggccagtcaaactcctcctgccaccacccctcctccagtcccccacccgcccagcaaccagagacctaacctggccccggccaattgggcagcctgaggccaaaacagcacccatccaatcctgggcggcagaggctgccgctccctgagaaaatgatatgcctgttccgagaaaccaaatatcctacaatgaatccaattagatttcataggcacatgagaacgcgatccatcttaaatgtcctctgcaaacctccagccacagataaatattttattccattccaagcagtcccgggcagaatatcaattagcatccagctgcctccctggcgggtccagacagtcctggctgaggagggggctctgagctgagaggggagcccccagtctttgccacgtgctgctgcttagccctggtgtcacctcaggcaggcggcttttccctcccgggctgtgtgtcctcacctgcggaatgggtttgcaacattgcccttcctgcttctcccccagtgccctagtgctgagcaaggaagttcatgttcactcatctgacaaacagtccctcagtagctgctgggtgccagcatcgtggttagcgttggggacacagccttgaataagataggtcagtctctcccctctggcagagctcacaatctgggaagagggcagcaacaataagcacataaatgaagaccgcttttgacagagacgagttttacaaaacacacaggctgctgtgacagagaaaaagagggagcacccactgtagactgaaggatcagggaaggcctccctgaggaggtgacgtctgtgccaagacctgaatcgggaaaagtattctagaaagaggtacagccaatgtgaacgccctgagggaggaaagtgcttggtgagttgaaggatctggcaaaccagtgtggctggagccgagtgaatgactaggagcggggtgtgagagaaagctggagacagtggcagggccagggttgggggtgtcagttcatgctacatctgtgttcagtagatgaattgtgaaaccatttacaactgcaaatgagcagggccaggaagacacatgtcatgccagtgggagggcccccaagtcagcgcagatgcaaacctggccccaggttccgtgctagggctctactgatgggaataggctgacaaaaaggaactacctgttactcaggatatccctcaacctggtcagagtcatttggggttcaaaactcatctctaccacttaccaactgggcaagtcactttgcttctctggactcagtttcctcctctataaaagaaaaggcataatctcacctacactttgggtctgttaaatgggctaatgcgtgtcaagtgtctgttggatcatatgtgcctcatgaatgaaatagttgctgttactactgctatcatcatcattacagtaattcaggcagtggctcatgcctgtcatcccagcactttgggagatcaagatgggaagattgcttgaacccaggggttcaagaccagcctgggcagcacagtgagaccctgtctctacaaaatattaaaaaattagctggacatggtggtgcatgccagtagtcccagctacttgggaggctgaggcaggaggatttcttgagcccaggaattccaagctgtagtggctatgatcacaaactccagcctgggtgatagggcaagaccctgtctcataaaaaaaaatttttttttattaaatacagtaattcatttactcctcctagtcaccctctgttactaccttcatcttaacaatggctcagagaggggaagcaacatactcaaagttcacacagatggtggaggaattgggcttttagcctgggtgtgttggattctgtagctggtattacttcctctttgccactcaactctgtgataatctagtacatggcttaaagagagcacagaatgagtagaaacctagagccttgtcctctgagaaaagaggacagaaagaggggtggatttgcccaaggctgtgtagctggcagaagaagagacagccagagcggatatgtcttagtccattttgtgctactgtaacagaataccacaggctgggtaatgtataatgaacagaaatgaattggctcacagttctggaggctgggaagtccaagtcaaggtgctggcatctggcgagggccttcttgctatgtcataacatggtggaaggcatcacatggcagaaggtcaaagagagagagaaacaatggaaagaggaggtgaacccactcctgcaatatcattcatgagacagagccctcatgacctaaacacatctttaaagtcccacctcccaagactgtcacaatggcaattaaatttcaacatgagttttagagaggacgaacagtcagaccatagcagaatgcaatccctgcatggccaaccaagggcaaagggagcttgtgttacctataatcccagagggcaaagctggggccaaagaagaaacctcaaggagaccgatagtctgagctgcccagtggtagaacagactgctttgtgaggtagtaatttgcccatttctggaagtatacaagcaaactcaacgtgtttccagaggaaatttgtattgcttatctattgctgcaaaacaactttagcagcctaaaacaacactaaacacatgttatcacacagtttctgtggatcaagaatttaggaccagcttagctaggtggtcttggctcagggatctctcattaggttgcagtcaggatgtcagctagggctgcagccatctgaaggcttgacttgggctggaagatttgcttccaagctcacttatagggctgatggcaggaggccacgtggaccactccatagggctgcttgagtgcctttgtaacacagtagatgtcttcccccagagcaagagatccaaaacagcaagttggaaactgcagtatctttcatagtctagctctgaaagtcacatactgtcatttccacagtatcctgttagttacccgggtcaaccctagtcagtatgggaggagaccgaccattcaaggctgtgaataccaggagacgagactcatcaggggacaccttggaggctggctatcacaaattggactatgaaatcttgactgtaccttccagtgtcagatgtccactctaaacctcagtttccccatctgtacaatggaggttggatttggtgattcctaagagttcctgtaggtctatggtagggtgaactcagggtcagtgtgtcaggccagctgcagagctccaggtggtggaactcaggggaagggcatgccagagggggacacagaggcctgtggtcacccccaaagtccatgagaggcaccaatgcaggctgcaggctgttcccctagaaggtaccatccccaggcactagaccacctcattgtaaaggaggcgtctcaagcagataagctgtgactggcacatccctccactcctgaaaaatcccacatagattagatcctatttcatccatctccccttccagcgagctttttctgaaagctcctctacgagagaccgtgaatgagggggtggaatggaatgcggggagcagagaggatgggcatgcatagatggtgtttctgtgtgtgacatcagtcttccccacaagacagctctcttagtgagcactggcctagcccacgggagatgtttacaaatatttgttggttggatgaatgaatgaatgaatgaatgaatgaatgaatgaagcagagacaaaaatgagtaagctgccattgcagcttgtgcagagcccaccagtcccatggggaccctcattccagtacagagtgcagatgatctagcagcctctgcacggttcagagcctcctggagggaggcagctgcggtcgagggggtagttgaggagcgggtcagggagggcctctggaggaggcggtgtgcgctgggccttgctgcagacctgggggaggagaaggccaatcaaggcagaggaaacgcacaaatagccaggagggagtgtgtcctgggaagagcgaatggcatgggctagagatgctgccacagaagtgggcaagggcaggttgccaaaggccttgaataccagggaagcagggcagccgggggaggccccttagtctaggaagaggaggttggagtcaggaagatgtggatagtggttaagagtatggactctggatttaaacggcctgggttcaaatcccatctctgtaaccttgggcaaattacttattctcagtgtctcagtctcctcgtcagcaaaatggagatgctgctagcagccaactgtctcaaggggctgttgagggtgaaagtgagttaacatacgtaagtgcttagaacagagtctgatacatcatgaggcagtgtaagtgttagttattctaagtattatgtacacatgcgagggaggctgggacatttctggcagaccacatgagaaattccagggagtacacatggggcgcctcggtgggagggagacttactattctttgaacacatcctaggcgtgtgctattttaataatgatggtggatggggcagggaggctggagcgggctggggactggttgggccagagctgatgggatccaaccatccagagaacatggggagaggagccaggactgggttagggtgttgggcactgccaccttagaaggacctggtgcctgttaaatgggaagttggagagagggtggagtgagggcaccccaatggtgacacacccatgttaggacatccaggcccacatggactccaggctggggacctccagaaaggggagaccaagaaacacgccaggctggtccccaagagcagggcccaaggtaagagcagcccctggggtgcagcgatgcttcttcaaaggtgatgaggcagtgacccaaggaaagtattggtgccaccgggagtctggagctgcgggctccaactgcggcatttgctgttggaagctagggccataaggagagcattcagccccctgttccacccattcagcccctctccttggtggggagttgggtggcaatgaaaaattcactcttgaaggccgggcgcggtggctcacgcctgtaatcccagcactttgggaggcccaggcgggtggatcacgaggtcaggagatcaagaccatcctggctaacacggtgaaaccctgtctctactaaaaatacaaaaaattagccaggcatggtggcgggcgcctgtagtcccagctactcaggaggctgaggcaggagaatggcgtgaacctgggaggcggagcttgcagtgagccgagattgcgccactgcactccaacctgggtgacagagcgagactccacctcaaaaaaaaaaaaaaaaaaaattcacccttgaagtcatgctggctgagtcacctctgctctgccaggcacagatgctctgcgtgtcttggtcacagggctgggtctgttctgcaaggcacagatgctctgcgtgtcttggtcacagggctgggaaggggtgacggagcacctgtggggacctccagggggctggccggtcagttgttgatgcccctctttaaagtggaggtgcagctcatagcagtatgtttggataccatgggtggttcccaacgctagaacacagctttgtaactgcaaagtactgtgcgcaacccatcccttcccatccctgagtgatgaagggacagggtgagtccccttcacccagggcagtgggctgcagaccctggaatcctagactgtgtgagctgtaggaaaccttaaagaccccttttctagccaacccccacattgcgcagacagggaaacaggcccagagattaacagggcccagcctcagatgatgtagtgagttaggggcccgatgaggaccagtcagcagcctctgtgccccagttttctaaagtaggggtgtaggggacagcgggaagcctgcaggagtccaacagacccaggttcgtatcctagctctgctacttaccagaggaactagagcctcagttccctcatctttcaatcagaagtaataataccctttgggaggttgaggtgggaggatcacttgaggccaggagtttgagaccagccagggcaacatagcaagaaccctgtctctacaaaaagtgaaaaaattagcagggtgttgtgacacatgcctgtaatctcagttccttgggaggctgagatgggggaaccgcttgaggctggagtttaaggctgcagtgagccatgattgcatcagggctggagtacagttgaccttcagtgaatggtgttcccctttaaaatgtgattctaaatggccattcacttcttcctgcattgttcatccattcattcaccaggcttttatttagcacctgctgtataccaggctctgagctgggcatgtggtcatgactcagaaacgtctttgtcctcaagggactcagagtgtgggagagaagactccagagttgctggaggggtgactcaagcaccatgtagccctgagagtcagaagaaagggcatttgggcccagctactgagataaataggagttcccttggcaatcaaggaaagggagaacattccaggcagaagatatggcaaccggctgtggtcagttgaggagcaggtcagggagggcctctggaggagatggtgtgtgtgctgggccttgctgcagacccaggggaggagaaggccaaccaaggcagaggaaacacacaaacagcctggagggagcgtgtcctgggaagagtgaatggcgtgggctggagatgctaccgcagaagtaggcaggggcaggttgccaaaggccttgaatgccagggaagcagggcagccaggggaggccctttagtcaaggaggatgtggttggagtcaggaagatgtggacagtggttaagagcatggtctctggacttaggcagcctgggttcgaatcccagcaaagtcatggaagtctgggacatcagaatgtgttctcggagctccaaagggccctttgtcgggggcttccaggtgggaagctggtgaggaaggagacacggggatctgggcaaggtcagacttaggggccaagccaggaggcttgggctttatcttagtttgagttttcctggagatgctgagacaaggattgtgggggtttgtttgggagataatccccggaaactatggtaggggagtgagaaagggaagaacagggaggagggcaaccacaatccttattgttatccaggcagttatccctgttgacagctgggctcagctccgctaaagacccctggaggaccaagcagaatacacaaggcagagttatctgcacccgaggactaagcgggcgggatgtttatccaccagctccccatccgtcattggttgagggctgcttccgcgggcatcatctcccggatatttcctgcttggcccgtgtccaagctgagcttgttcctgcaggcagtcacaagcatttgcagtaggcatctgccacaggtttcatcctgccattgcctttgcgggaagagggaccacccaatgcctgtgctgggggaaccctcagagtaagaagcccctgtgggctctttgcacagcctgggctcacctttccccaggcgtctagcactgaggtcaggtcaggtcatgcctgctgggaaaactttgaggactcccaggagcctgcagcttattatattttaaaataaagttttgcaatagatatatattcacatgattaaaattctaatgactaaatgcaatgcggtatcctcgactggatcctgaaacagaaaaaggacgttaatggaaatggtgaaatccaaataaagtctggagtttagttaatagtaatgtaccaatgttaatttcaacaaatgtaccattgttatgtaaaatgttaacattagaggaaaccaggtgagggttatacaagaagtctctatactatctgcaacctagaataatctaaaactattgccaaataaaaggctttttttttttttttttttgagacagagtctcgctctgtcacccaggctggagtgtggtggcgccatcttggctcactgcaacctccacctcccgggttcaagcgattctcatgcctcagtcttccaaatagctgggattacaggcatgtgcagccatgcccagctaatttttttgtattcttagtagaggcggagttttgccatgttggtcaggctggcctcgaactcttggtcttcaactcctggcctcagcctcccaaagtgctgggatgacagctgtgagccaccgtgcacaacctaaaagacttatttttttcatgtatcccagaacttaaagtaaaataaaaaaaatttttttaagactttttttttttaactcttttttttttttttttaactctaaagaaacataggctgtgtgcagtgtctcatacctgtaatcctatgggaggctgaggcgggcagatcacccaaggtcaggagtttgagaccagcctggcaaaaccccatctctacaaaaaatacaaaaattagccaggcatggtggcatgcacctgtagtcccagctactagggaggctgaggcaggagaatcacttgaacccaggagacagaggttgcagtgagccaagatcacaccactgcactccagcctgggcaacagagcaagactgtctcaaaaaaaaaaaaagaaacataataaaaagccctcctcctggccgggcgcagtggctcaagcctgtaatcccagcactttgggaggccaaggtgggcggatcacgaggtcaggagatcgagaccatcctggctaacacggtgaaaccccgtctctactaaaaatacaaaaaaattagccgggtatggtggcgggcgcctatagtcccagctactcgggaggctgaggcaggagaatggcatgaacccgggaggcggagcttgcagtgagccgagatcacgccactgcactccagcctgggcgacagagttagactccgtctcaaaaaaaaaaaaaaaaaagtactcctcctactctttcttccatccaccttgttcctgttcctagtttattgggtacccttccactgataggcaaatacgaataaaattcttggacccctcttttagaggattggtagctgcatactgtagcagatgctgtcagtgccctgcctctaccacctcaagctcagtttggtttatgccagccacttccttctggaaaaacctgcatttctccagctgagggctttctttcagcctgcactgggagggtggaagtgctggggtgttcatttccccaggggcagccctcagccattgcagaaggaagtggagaatacggaccccaactccctcgcccttccatgggataactctgagatatgtgttctacctgaagtgtagatgtgataatccaattttgcatcactataaagaaatatctgaggctgagtaatgtataaagaaaagagctttaattggcttacagttctgcaagctatacaagcatagctccagcatctgcttctgatgagggcctcaggaagcttccaatcatggctgaaggtgaagggaaagcaggcagtgtcatatggcaagagagggagtgtgggggataggggaggtgccacacccttttaaacaacctggtgaactaccagagtgagaattcactcatcactatgggaatggtgctaagccattcttgagggacgtgcccccatgatccaaacacctcccaccaaaccccacctccaacacaggggatcccattccaacatgagatttgcaggggacaaacatccaaaccatatcagcagagttcccagcggggttaagcctgggtgccacagcgaggttgtgcagccttcattggctctccttgtgtccccatccccacactgtacttcctgggatcacctcccaaatagattcaaattcttttttgttttgttttgttttgttttgttttttgagacagagtcttgttctgttgcccaggctggaatgcagtgggatgatctcagctcactgcaacctccgcctcctgggttcaagcaattctcctgcctcatcctccaagtagctgggactacaggcatgcgccatcgcacccagctaatttttgtatttttagtagaaatggggtttcactatgttggccaggctggtctcaaactcgtgacctcaggtgatccgcccacctcagcctcccaaagtgcaggattatagacgtgggccaccgcgcctggccttcaattcaaattcttgtctgagggtctgcttctcggagaacccaaatcagacagatgccctgaccccgttctgccccttgctgtgttcactttacagtacctttggagagctttccacatcagtacactcagtgccaccttattctttttgacagctgcatagcagtccatggggtgctgggtgatcttttacccggtctcctcatggacagccttttgggatgttttcagccctttgctaatacaaatattatgtcaggaaaggccccacacacccatcatttcccacgtgcataaggcaaggccgctggtaattcctagaagcggaattgctggcacccatggcctttggggtctcctctattttgatggctgatggcctacagtttaaatccagagttcctagaggggcagggggcatcaagccctccaggatctgagcccaggcattcgcttccctgtctccctcaaagcccatgcccaccacatggacaatctgctgtcccccagcactccctgaatccctcgcctttggccatgattttgtctctacttatccctttttatgaaacgctcttccctgtacctttgtctgtggaaatcttacttgtcctcagagatctggctgaaataccgtctcctctggggacccttcctggtgcccctgtgagtattaatctctgtcttcactgggctgcacatcctggcttcgacactccaggatttatttttatgtgttctccaagtgctgtgtgtatttctgcctccctccacttgtccacaagctctttaagggctgaggccatctgagtcacagagcaggctccataaatgttggaagaattgaattaaatgtgctggcaattgctgcattctgaccattttgttctgctgtttgccagcatgaccttccaggatggttccccagtgggggccggaatgaaacagggcgaggcaggtggcctccagaatccgcctgccctgcagtcagagctctgaggctagagggcagggcagcatggacagcctttgcacagtcctcccctaagaggcatctcccagcctgtcagacgaaggttttggtgagcccacagttagaggctgtgtcccctgagcatggcccaggctcagggttctgtgaggtggtggccaactggacattgtctcctgagagctgagaagcagcacaggaagctcattagtggcatgggctctggagccaaattgcctgggttcaaatcccagctctgacacctgtgtgaccttgtacaaatcatttctctctatgcctctgttctctttctatagaacgggaccaacaatgagacctccttcatagggctgattggaggattcaaaaagatcatccaaacaaagtgcttacgtgtatgtaggaagcatctgatcagtaagctctgaaaaggtcttgattcacaagacttttgggagttcatgtaacaaccgcagcacctctttattgagcacctactagagaccttatggggtgctctctgtgtacactcatactggagcttacagatacatcctccaggtgaaacgccttttaaaactgaggtagaatacatataaaattggccatttaaaccattttagagttacaattcagtggcatgaagtatattcacagtgttgtacagccatcaccactgtttattccagaactcttttcttttttttttttttttttggaacagagtctcactctgtcacccaggctggagtacagtgttgcgatcttggctcactgcaacctccgcctcctgggtttaagcgattcttgtgcctcagccttctgagtagctggggttacaggcgtgtgccaccacacctggctattttttgtatttttagtagagacagtttcaccatgttggccaggatggtctcgaactccccacctcagatgatccacccacctcgggctcccaaagtgttgggattacaggcatgagccaccgtgcccggccttattccagaactctttcatcacccctaacagagaccttgtacccattaagtagtcactccccattcctctgtcctccctagcctctggcaattactaatccactttttgttcctgttgatttgcttgttctggacttttttttttttttttttttttgagatggagtctcactctgtcgcccaggctggagtgcagtggcatgatctcagctcactgcaacctccgcctcctgggtcaagcgattcttctgcctcagcctcccaagtagctggactacaggtgtgtgccaccaggcccagctaattttttgtttttttttttagtagaggtggggtttcaccatgttaaccaggatggtcttgagctcctgacctcgtgatccaccctcctcgatctcccaaaatgctggaattacaggcataagccaccgcgcccggcctattctggacatttcatataaagggagtcctaccttaggtggcctttgcctctggcttctttcactgagcatgtttttgaggttcattcctgctgagacatggatcagaacttcattccttcttatggcagaataatattccattgtatggcaagtgaagtgtctgatacatgcttcccatgttaagaaaccaaggctcagagaggccagctgacatgcatagggtcacaccatggggaagaagtagagtgagatttatacccaggtcaaatagggtccagacctgttctcttccccctttaaggatgcctggtttacaagctctttcctatccagctggtcccgtttgcccctcacaagagccccacaccgttgggataatcatctccagtttcaaatgaagaaaactgagatgaaaaaggtgacttgcctgaggtcacaaggtgagttagccaggactggggtcccagcccccacaagcacaacaacaaaccctgcttgaaaacagcagccaagggggtgatcctggtccatccagaccctgctggaatgggaaggcggaaagatgagtgcctgcgtcgtcccccttcccagccctatagttgtcccagtggtgacctggagagccatctctagggctgatcggtgcccgccctgcagctgtggccagctgtcccccaccagctcttctgcaaggccccaggaatgtccataccagggtggtttttggtatttattcatcagcaaaaagttgtttctgttgactagcacttctccaagcatggccaggctgctgattctccagcctgagtgtgcagaaagctcaggatcaggagaactgagccctccacctgctgtgtgaccttgggcaagtgtcagcccctgcttgagcccagttagcaaagtggagcgtgagagagttggatcagacatgagaggtttggtgctgggtgacattccacaactcacaggctttagagagtattccatgggggctccagggggcagaggccctgttcctgtccccctccagttccatgtaagcctcatgggaaatggccactagccatttgtggccactgggcacttgaaatatggcaaatgcaactgaaattttaaatttaattctatttaagtttaatcatatgtatagagcaagtctagagagttgtgctctgggaatgcaaggagggatgagggccatgcagaaagagctcacagcccagaacatacccaacctttgttggttcaaaacctccagagagggctgggcacagtggctcattcctgtaataccagcactttgagaggccaaggcaggtggatcacctgaggccaggagtttgagaccagcctgaccaacatggtgaaaccccgtctctactaaaaatacaaaaattagccaggcatgatggcacatgcctgtaatcccagctactcaggaggctgaggcatgaaaatcgcttgaacctggaggtggaggttgcagtgagccaaggttgtgccactgcactccaacctgggtgacagagtgagactctgtctcaaaagaaaacaaaacaaaacaaaaacagaaacaaaacaaacgaaaacgtccagagagcgctggcctaggagtccagaggtctgggtacaaattgcagctgccaccaatatgttgtgtgactaggccaaatctcagtccctctctgaacttctagatggctaaatagagacagtgcccggccctgtctggctctagagcccatccttcctctagcaccctgacctccttgtgtaggtgggactcattgttagggatagtaacagcaatacttgcgtatttgctgtatgccagcctctgtgctgagaaccatctgtctgtgttacctcgttgatctctcccaacaaccctttgaggacactggggctcagggaggttaggtaagtggctcaaggtcacacagcaagtaaatgttggcaccaggattcaaactcaagaaggctggctccagagccacattcccagcctccacgccatacacacacatacactatctccaggggcaggctcctactcaacctcccctggggccagcagagggagtggcactgaagcctggaatctcaagtggtggtccccaggtgaggcctggagatggaggggaggggccagccatgatcatcatcaggatcaccctctcatcccctcaactcagacttttcctaggtgaggatgggggaacctgattccccaggggttgaaggggtcttggcttgggagtccagggaagaagctcagaccagactcatatgctttatgtcagccacagacctgtcttcctttgctgtatgtccccatggtcctttatgcttgggatgagcgtataattcattatctaagccatgacttatttatttatttacttacttatttattcggagatggagtcttgctttgtcgcccaggctggagtgcagtggcatgatcttggctcactgcaacctccacctcccgggttcaagcgattctcctgcctcagcctcccaactagctgggattacaggcatatgccactgtacctgactaatttttgtatttttagtatagacagggtttcaccatgttggctaggctggtctcgaactcctgacctcaagagacccacctgccttggcctcccaaagtactgggattacaggcgtgagccacgcacccggcctaaaccatgacatttttgagaatgaaacagcactaaccatcggggactccaggacagttggtggaacccgggcgaaccaggatgtctgtcgccctctccatgcaccaccatgtatagagggccagctctgtacagagtcgttgcttctggctcagagggacacttaggttaatctgtgactcctcaggtgggagctcccatcatggggaacccagaggaggccttacccccgacttttaaggtcagggaagatttcttggagcagggtgtgtcttctctgagcttcaaggattttaagcagggaaaggcttggctaaggatagggtgttttaaggaatgttctcaggaacagaaacgccagcctagcctgtgtgggattcagacatggagaagaagcaaaaaagaggtgtggagaggcctatccatcaactcccttctctcccatcgggcagctgcagctctccagctcccctccctttgaggctctgtctgactacctcattcattgaacaagtgttgattgtgcacctactaggtgccaactctacgcttagcaccagggatagagtggaaaatgaaacaggtgcggtccctcccctcttggagctcacagagcgcgggaggcactaatcaagtatgtgaggagccaagcaggataatcagagaccctggtcaggtttggaaaacaatcaggaggggtgttgagagaacgcagtgggagggaggtgacttctagacacaggggtctggggtggcctctgaggaggtgacgtttaatcagggatctaaatcaatagaggcagccgagtatgtgaagtgttgaggggtggatggaacagcatgggcaaaggccccatggcaggcaagagctgggagcgctggggaagtaactaaggaggagactggcatggctttggtgggctgagcaggctggagtttgagttttgtttttgtttttgtttttgtttttgttttttctgagttagggtctcactctgttgcccagtctggagtatagtggcacaatcacggctcactgaagcctcaacctcccaggctcaagcaatcttcccgtcacagcctcccaagtcactaggactacaggtgtacacggctacacctggccaaatttttttaatgttttggagcgacagggtctcactatgctgcccagacaggtctcaaactgctgggctcaagtgatcctcccaccttggcctcccaaagtgctgggattataagcatgagtctccgtgcccggcctgagacgagttctgcctgagggtagacctggaagcattttaggggtactgggtgaagcgatcccatttgaggtttggtgggtttttttggttttttttttttgttgttgttgttgtttgagatggggttttgctgttgtcacccaggttggaatgcagtggcacaatctcagctcactgaaacctccacctcccaagttcaagcgattctcctgcctcagcctcccgagcagctgggattacaggtgctcgccaccatgcccagctaatttttgtatttttattagagacagagtttcaccatgttggccaggctagcctcaaactcctgaccttaggtgatccacccacctcggcctcccaaagtgctgggattataggcgtgagccaccgcgcccggcctcatttggttgtgtgtgtgtgcgcgcatatgtgtgtgtgtatgtttcagagggagtctcgctcttgccgtccaggctggagtacaatggcgcgatcttggctcactgtaacctctgcctcccgggttccagcaattgtcctgcctcagcctcccaagtagctgggattacaggcgctcactgccacacctggctaattttttatttttagtagagacagagtttcaccatgttggccaggctagtctcgaattcctgacctcaagtgattcacccacctcggcctcccaaagtgctgggattacaggtgtgagccaccgtgcctggcccatttggggtttttgaaggacaaccttggttccatctctgtagtccctttgttctgagagtctagaagacttcagttcttaggtctgtgttttcttatcttttcagtgtctaccacacaaagatgagtgctgcgtatggagcccctgtgacccacagagtctctgctgaagccaggcaggtttcaatgggggtggggtcacagagaggccaagtaagcagccctgtccctaccgagcccccaccccctgaggagctgtgacatccacatcctgggccctgtgttcagagttcactgtcaggatgggcctgggaattcacttctcatggttgtcttcaagtggaggagggacccgaggtgggagcagtgtcagtcacacgtccccagcagccatggcctgctatcttgttgaccaaacaactagttgaatatcatgcttttcagacagttgctatggacacggacttaggctggaaacaattcagaccttgaatgcatcaggattatggagctgtcttagatggaaggaatcccggaatctcaactcagcctggtgggcagggccatgggatgtgggctcaaggatcaggctcggattcatacccagcgccacccccttctggatgtggggcctagagaggtgacttcagccattgagctgctgcttctcctctaacatgggtagattcgtgacctatttctttctttcttttttttttcttttttttgagatagggtcttactcttgtcacctagactggagtgcagtggcaaaatcatggctcactgtagtctcgacctccttgactcaagcaatcctctcatctcagcctcctgaacagctgggactacagctgcgtgccaccatacccagctaattttctcatgctttattttttgtagagatggggtcctcgttatgttgcccaggctggttttgaactcctggcctcaagtgatcttcctgctcagcccaaagtgctgggattataggtgtgagccactgtacttggccctcagtgacctatttctgcatagtaaatcaccccaaaacttggccatggtttccagcaataaatatgtatcatctcacagagcttctaggggtcaggaatcgggtaatggctcagggtctttcatgagatgcagtcaagttgtcagctactgccatctgaagtcctacttcaggggctactgccatccgaagtcctaactggggctgcaggatccccttccaaggtggttcacccacagggttggcaagttagtgctggctgttggcaggaggcctcagttccttccacatggccctctccttaggactacttgagtgtcctcacaacatggcggctaacttctccaagggagcaaagcagaagctgcagtgtctttcctgacctagcctcagaggtcacacttggtcatctccacaatatcctattggtgacaccggtcaaccctgcacatgttaagggagaggggtgtacacaaggatgggacttcaggaggtggggaccaccggggtgtatcttggaggctggctgccatggtggatgcaatattcccagcaggaggagttgtagtgaggattaaatgagctcacataatgtgaagcacctggtatacaataagcactcaataaaggatcacacacagctctccccactagcctgattggcttgagtggaaaacttaactaccctgtagctgcctcactttctggatcatttcttggcgtccccaaggccttccaccactctttcattcaacacaatcttcatgaacacctactatatccaagccccgtgctggatgctggagacgcagtggtggcagagacacagtctgtacttgctgttccaggctgcttcgggcatacatcagagcagagaggggctggcagacgaggagctgctttggacagtgtggtcagggatcgcctctcagtggatgtagcctgtgagccaagtcctgaatgaagtgagggggcattgtgtggacacaggagggaagagcactccaggcagctggatcaggtagggcaaaagcaggagcaaaccatccatgtcccaaggacagaatgaagacccaagggaagaggggcaggaaatgaggtcgggaaagccagaagaagactggtttttggccaggcgcagtgacccacacctgtaatcccagcactttgagaggctaaggtgggcggatcacctgagcccaggagttcaggactggcctgggcaacatggggaaaccttgtctctataaaaaacacaaaaattaggctgggtgtggtagctcacacctgtaatcctagcactttgggaggccgaggcgggcggatcacctgaggtcgggagttcaagcccagccaaaccaacatggagaaacccagtctctactaaaaattcaaaattagccaggcgtggtggcgcatgcctgtaatcccagctactctggaggctgaggcaggagaatcgcttgaacctgggaggcggaggtttcagtgagccaagattgtgccattgcactccagcttgggcaacaagagcgaaaactctgtctcaagaaaaaaaaaaaattagtagccgtgcctgtggtgcacagctatagtcccagctacccaggaagctgagaccggaggatctcttgagcccaggaggtcaaggctgcagtgagctatgaacatgccactgcactccagcctgggcaaaaaacacagcaagaccctatttcaaaaaataatactaataaagaagactaggggccgggcgcggtggctcatgcctataatcccagcactttgggaggccgaggcagggagatcacttgaagtcaggagttggagatcagcctggccaacatggtgaacccccgtgtctgctaagaatacaaaaaaattggctgggcgtggtgacgtgtgcctttaatcccagctgtttgggaggctgaggcaggagaatcgcttgaacctgggaagcagaggttgcagtgagccgagatcgcacaactgtactatggtctgggtgacagagtgagactgtctcaaaaaaaaaaaaaaagagagaataggttttagtccaagggccatgggagtctttgaaaggatctgaacagcagtcatctgagtgagagatagtggggactcggcctggggcagggctgtggaggtggtaggtggaggaactctggggatatgtggaagggagacttgtttttacagtttgtgctgctgaatgggatgctggggtagtgaaagaggagtcaagggtacttcccggtttctgacctgaacaagcaggaggatgatgttgtcatgagtagaatcggggcagactgtgggcggagcaggtcggggcgggtgagagatcccgtgttctatcttggacctgtcagacatccagggcaagatgtcaaggaggcagttagagatctgagtctggcgtctgagagacagattgggcggaagatgtaaattcaggagttgtcagataggtggtgtttaaggccatgcgtcaggatgagatcagcagaggagagggtgtgttagagcaaggcggagagcacccgggtcctctagcatttagacgtcagaggagagaagccagcaagagccggagcaggtatgagagatgtgggttgagcacgggaagggtgcccaaagacacagccatggcgcaacacagccagccactctctaccttcaccccaccccaggcagcagcaaggccctggaggcccccacagaatccatccttccccttccacacatcgtcccttcagaggtctaaggcagagaatgtgtcctccatggactgctatgtacacccccagaatgttcggccattccacctcacttcatttctaagccttcatcatctaactcagcattgagcaggaccacccctcccttcacttagactctctacctctgttaatgcaaccttagacagaagtaggctttctggtagtaacaaatatacaagatatgagtggggaattgtaagggatccaggctggttaaagggaagggccgtcaagaaaggaaatgggattggtaatatctgaaaaggtttatggttagatcagtgagggtcttgattgccacaccaagcagtttggactgaggtgggaagaaggattcacagaaggttctggcttaagggaatgatgcagtcaggtgagttttgtgtcaggaagagccatgctaggttctgttcctggccttgtccctaattagctctcccatgctcacaggcccactctggcaccacgatgagatgaggtagggcagggaggtctcactctggcatgtgggggtggcggctgcagacacagaggcaccatggagcagggaggttcccagggaggcagcagctttgctgggccctccacgtttccataagggcaatgatgcttatattaatgagcagtaattatgggcacccgggtgggcctaagtatagctcattgaaaaaggcagctcgaggcagccagctgcttccccctgcaagggcaaggcctgcctattttaagacctccctaaggtgaggatcctgccaccctaggtgttgggtggctgagggcctgtcacccactgggccaggaaccctgatcaagggagctcagaggagtcagggtgaccagatgctcagaccgtcctcattcaagccccccattgcctagaggaggaaactgaggcacagaagggggaaaggaccagtacgaggtcacagcaaataaatagcaggtttagaatttaaatccaaggggtctggcatggtggctcatgcctgtaatcccagcattttgggaggctgaggcgggcggatcacttgagctcaggagttcgagacctggccaatggtgaaaccccgtctctaccaaaagtacaaaaattagccaggcgtggtggcaggcaactgtaatcccagctattgaggaggctgaggcaggagaattccttgaactcggggggcagaggttgcagtgagccaagatcacactactgaactccagcctgggtgacagagcaagactccgtctcaaaaaaaaaaaaaaaaaaaaaaaaaaaaggacagtatttgaatacaggtccaactacatgcagtttccaccatgccgtgcagcattcctcacctggaagctttggcctgtccccaagaagcacagtatagtgaggtgaggaggggaacagagtgtgactgatactgattgggcatcgaaatgcgaggctttctatatgacatcacagttcaaccttattataatttttaaaagtaaggatcatggccagtaatcccagcactttgggaggccgaggcgggtggatcatctgaggtcaggagttcgagaccagcctggccaacatggggaaactgtctctaccaaaaatacaaaatgtagctgggcacggtggcgctcacctgtaatcccagctactcgggaggctgaggcgggagaattgcttgaacccgggaggcagaggttgcagtgagccgagatcatgccgctgcactccagcccgagtgacagaatgagactcggtctaaaaaaaaaccgaaaacggatcattatccccatgttacagaagaggaaaccgaggctcagggggaatgactgaatcaccaagtgtcctgcagtgaggaggggaagaagtagaatccagttccgtcctatctcaggtcagcttccccaggaaacagactcaggtttgcatgagaagtttcctgggaaatcagttcggaacatctgtgacaggtgaaggggacaggattgggcagagggaagaggtgaacctcaatacagcacaacagaggcctcagcgaatcccatagggagctctggaactgggatggccctttagggttgttctgaattggggcaagggagccacaccttggtacccaaacattgaccagttattggatgcagggtgcccctgggaaggagcataaggacagactatgggtggagcaggtcagggtgggtgggagaatgagttctgtatcttggacctgtcagacttccagggcaagatgtcaaggaggcagttagagatccaagtctggcatcttgggtgaggcatctccctttggctgagagcagctcctagcgggaacttggctgtgaattgtcagcagccaatgctcttggcagctggggttgtgagtgcctctgtgcaggggggtcctgggtggccatcacagcatccactgcacatccatctccagagccgttctcattcctctgaccccagatgagaaccagcccctgctctcaggaaagttacgggcacatggactcctgtttttttgtttgttttgtttgtttttttttttttttgagacagagtcttgctctgtcactcagtctggagtgcagtggcacaatctcagctcactgcaacctctgcctttcagattgaagtgattctcctgcctctgcctcccaagtggctgggattataggctcaagccaccacgtctggctaattgttgtatttttagtagagatggggtttcgccatattgggcagggtggtctcaaattcctgacctcaagtaatccaggcgtgagccaccatgcccagccttacactccttttctttatggtgctcacaggccaggggatgctggggggaagggaagccatcagtgctaatggggaaggaaagagcgagtaagtggtcagtcctggaagaggagaaaaatactaccaaaaccccacaaagacagaatgggagaaaatatttacaaaccatatatctgctaagggttcaatatctagaatatatacaaagaattcctagagcttaacaacaaaaatgacaaacaacccaattataaaatgggcaaaggacttaaatagacatttctcccaagaagatatacagacagccaataagcacatggaaagatgctcaacatcattagtcatcaggaaaatgcaaatcaaagccacagggagataccagttcacacctactaggatgactataatttttttaaaaaggaaataagttctggcaagatctgggaaaactggaacccctgtatattgctggtgggaacgtcatatggtgcagctgctatggaaaacagtttggtggttccgcaaaaagttaaacataggggctgggcgtggtggctcgcctgtaatcccagcacttttggaggccaaggcgggtggatcacaaggtcaggagttcaagaacagcctggccaaatggtgaaaccccgtctctactaaaaatacaaaacatagccaggtgcagtggcgggcacctgtaatcccagctactcgggttgctgaggcaggagaatcacttgaacccaggaggcggaggttgcagtgagccaagatcatgccattgcactccagcctgggcgacaagagcaagactccatctcaaaaacaaaacaaaacaaaagttaaacatagaattactgtatgatccagcaattccacttggatattaacccaaaacaattgaaaacagagactcaaacagatacttggacaccattgtttgtagcaatattattcacaatagccaaaaggtagaaacaacccaggtgtccatccaaagatgaatggattaaacaaaatgtactatatatgcaggatggaatatgatgcagccataaaacggaatgaagttctgacccatgctacaacatgggtgaacttagaaaacaaacattatgctacgtgaaataggtcagacacaaaataacaaatgttatatgattccacatattgagaatatttagcataggcaaattcagagagacagaaagtaggttaaatattactaggggccgccaggcatagggctcacatctgtaatcccagcactttgggaggccaaggcaggcatttcacttgaagtcaagagttcaagaccagcctggccaacatggtgaaacccgttctccactaaaaatacaaaaattagctgggcatggtggcatgcgcctctaatcccagctacttgggaggctgaggcacgagaatcgcttgaacccaggaggcagaggttgcagtgagccgagatcgcaccaccgcactccagcctgggtgacagagcgagactctcagactctgtctcaaaaaaaaaaatgaataaaagaaattaccaggggctaggagaaggaggagaaaagaagtttttgcttaatgggtacagagtttctgtttggggtgatggaatggttttggaaatagatcatagtggtggttacacaacattgtgagtgtccataatgccccactgaattgcacgcttaaagatggttaaaatggcaaattttatgttacatgtattttgctacaataaaagtaatacctacgggaaataggaaaattcatagacacggaaagtatctatggacgtggttgtcagaagctgggaaaaggggaaaatagggaatgactgcttattggggatgcggtttgcttttggggttatgaaaatgtttcagggctgggtgtggtggctcatgcctgtaatcccaacattgtgggaggctgaggcaggagtattgcttgagcccaggagttccagaccagcttgggcaacataatgagactcctgtctgtaccaaaaaaaaaaaaaatgttttttctaattagctgggcatgtacctatagtctcagctactcaagaagctgatgtgggaggacatttgagcccaggagatcaaagctgcggtgagctatgatcacaccactgcactccagcctcggcaacagagcgagaccctgtctcaaaagaaagaaagaggctgggtgcaatggctcatgcctgtaatctcaacactttgggaggccgaggcaggcggatcatgaagtcaggagttagagaccagcctggccaacatagtgaaaccccatctgtactaaaaattacaaaaattagccggatgtggtggcatgcacctgtagtcccagctactcaggaggttgaggcaggagaatcggttgaacctgggaggcagaggttgcagtgagctgagaccacaccattgcactccaacctgggtgacagagtgagagtccatcaaaagaaagaagtgggagggagggagggaaggaaggaaggaaggaaggaaggaaatatttcggaactagatggaggtagtgattacacagcattgttactaaatgtcactaaattgtacactttaaaatgactaattttatgttacattaatttctcctcagtttttttttaaaaaaggaaaaaaggctgggtgcagtggctcacgcctgtaatcccagcattttgggaggccaaggtgggtggatcacagaaggtcaggagttcgagaccagcctggtcaacatggtgaaaacctgtctctactaaaaatacaaaaattagctgggcgtggtggtgcgtgcctataatcccggctactagttaggctgaggcacgagaatcgctggaacccaggaggcagaggttgcagtgagctgagaccaccccattgcactccagcctgggcgacaagagcaagactccgtgtcaaaaaataaaaataaaaaagggaaaaaaaactggaaaaatacaatccataatatgcagctaatagatactcaggggaaaatatatagcttttctgtgacacatttattagagtataaggagatcagaaaacaaatgaactaaacgtccaactcaaaaaggtggaaaaggtgttagaataagaaagtgtgctgaacccagctttagcaggggtgagggagggaggcaccttgcaagaggagggttgaacctctaggactatactgtcaacctggtagccacttgccacatgtgctatttaaattaaattaattaaactttttaaaaaattaaaaattcagtttcccagtcgcactagctgcatgtcaagtgctctgtggcccagtggctaccatattggacagctcagatctaggggaagatggacaagaaactagcaaacaagtaaacacatgagagtttcccagagcagtgagagctatgaagaaatcctgaagggtgtgagcttggctggcaggtggacagtaagagatgggaacaaggttggagaagctggtggaagctgggccatgctgggccagatggacatccactctttgctgaggccacctggtaccgtcccatcctccccaccctctgcccctcagctggtggatccagcccccacactgtcccctttctttgcacatcctccagttcagcagggccagtgggctgggtggggcctgcgttaagagtcaagaagacctgggttccagtcctggttccgtgtggctttgtgctgtctggttcccagactggcgcactttgtctcataggatgttctagaggtcagagtctaaaacggattgcagagctacattctctctggaggctctaggggagaattcatctctttttttgagacacagtcccactttgttgcccaggctggtctcaaactcctggcctcaagcaatcctcctgccttggcctcccaaagtgctgggattacaggcgtaagccaccatgcccagccatctctgccagcttctgaaggctgcctgcattccttggctcatgtctccacatcactctgatctctgcttctgttggcacatctcctctgactctgaccttcctgcctgtttatttatttatttatgtatttatttttgagacagagtctcactctgttgcccaggctggagtgcagtggcacaatctcggctcactgcaacctccacctccaggttcaagtgattttcctgcctcagcctcccaagtagctgggattataggcgcacgccatcacacccagtaatttttgtatttttagtagagatggggtttcactacgttggccaggctggtctcaaactcctgacctcaagtgatctgccctgccttggcctccaaaagtgctgggattacagatatgagaaaccatggctggcccattcctgtttctttttttcttttttttttttttttttttttttgagacagagtcttattctgtcacccaggctggagtgcagtggcacgatctcagctcactgcgaactctgcctcctgggctcaagtgattctccagaagcctcagcctcccaagtagctggcattacaagcacacaccccacacccagctaattttttgttttttggtagagatggggtttcactgtgttggcctgggtggtctcaaactcctgatctcaagtgatccacctgccttggcctccaaaagtgctgggattacaggtgtgagccaccatgcccagcccatgcctctttcttatagggaccgtgtgattagcttgagcctatccagataattcatgatagtctccccatctcaagatccttaatcacatttgcaaaataaccacacctgccaagttccttttgacaaggtcatgggcatatttgggggccattattctgccctccatacttgatgtcagccagagcctttgtgctgtgacctgacccagcccctctgagagccctccctccacaaaccttgtcctcacttgctctgctccagccacactgactctttgccaatcctcagcacaccaggctcaggccaaaccaagtcttggtactcccacgtacagggccggtgggcttagaaacctcgccaacctctctgctccatggcagacaggaagattgaggcccaggctcagaaaaggaagggacttacctaagttttggactagtatttccaggatgttcccattttacaacaggggaaactgaggcacagcaactgcacctaaatgccaccctcttgtgagcccttgccttgcttgtcctgaggacgtgcccctgttattgactctgagagctctattccaggccatctttgcttcatctcaattggaaatgatgggcctatgggcttgttggcctctttggtgtcagaagccctcagcacctgcccagcagtcatacttggtagacattcggtgaagggcagagcaggtttttgcagagggcttccatttgacataggaattcctctgttaaacaattggacggtactgccctcagacctggatgagatgggcccttgccctaggtccttctttttggaaggcctctctaggcaggcacagtggcccacagctataatcccagcactttgggagaccaaggctggaggatcccttgatcccaggaggccaaggctgcagtgagctgtctgtgaccttgttgcaaaaaaaaaaaaaaaaaaaaaaaaggccaggcatggtggctcatgcctgtaatctcagtactttggaaggccaaggtgggcggatcacttgaggtcaggagttcgagaccagtctggccaacatagtgaaaccctgtctctactaaaaatacaaaaattagccatgtgtggtggcatgcatctgtaatcccagctactcggcaggctgaggcaggagaatcacttgaacccgggagacggaggttgcagtgagccaggatcacaccactgcactccagcctgggtaacagagtgagactctgtctctaaaaaaaaaaaaaaaaaaagacctctctggccctctaaaagtccatgtttttccccataaggcaaggagagttcaggagccctggggacatgcccaccagcaggctgcatccccccatagaccaccctggatactgggcaccctgggattccctgcccaaatgacccacgcctgcctccagggccagcacagggtcctcccgtgggaggtggaccctgccacagggaccatcctggggttccgggatgactgtttgggggcctgtggacagagctaggagatgtgggctggggtatttgcatctatgtggaccctcggggtgagggacagagtcagaaacggaaagagagtggaggatgggcagccccccacccatatttcatcatggaattcagaggagacccagaactctgagtctgagcctggttttccaggttgttttaaagatacagtcctcaagctagaagaatggaagatgttgtgcttgtctgatagtcggtagcttgagttgtaacttttatttatacacagagtacgtgggcctcggtgtgtactcctgtcctcaggcccacaacattgaggactggcttcagagatcctcccagccttgcgatctggatctgaccttcccggcacccctccccgacaatccagctgaccagctgaccgctttctgtcttctctccctaggatagctgccgcccgggagaggtgacccgggcgccctgctagggtgaaggcccctgccctcggcccgggatcatgaaaggcctcggtgacagccgcccccgccacctctccgacagcctagacccaccccacgagcccctgtttgcagggaccgaccgcaacccctacctgctgtcgcccacggaggccttcgcccgcgaggcccgcttccccgggcagaacaccctgccaggagatggcctctttcccctcaacaaccagctgcccccgcccagcagcacctttccccgcatccactacaactcccacttcgaggtgccagaggagagccccttccccagccatgcccaagccaccaagatcaaccggctgcccgccaacctcctggaccagtttgagaagcagctgcccatccaccgtgatggcttcagcaccctccaatttccccgtggcgaggccaaggcccgtggtgagagccctggccgcatccgccacctggtccactcagtccagcggcttttcttcaccaaggcaccctcactggagggcacagcgggcaaggtcggtggcaatggcagcaagaagggtggcatggaggacggcaagggccggagggccaaaagcaaggagcgggccaaggctggggagcccaaacggcgcagccgctccaacatctcaggctggtggagctccgatgacaacttggacggcgaggccggcgccttccgcagcagtggcccagcctctgggctgatgacactaggccgccaggcagaacgcagccagccacgctacttcatgcacgcctacaacaccatcagtgggcacatgctcaaaaccaccaagaacaacactactgagctgactgccccaccacccccgcccgcacccccagccacctgccccagccttggggtgggcactgacaccaactacgtcaaacggggctcctggtccactctgaccctcagccacgcccacgaggtctgccagaagacctcagccaccttggataagagcctgctcaagtccaaatcctgccaccagggtctagcctaccattacctgcaggtgggtctctggcagggtcaggggtgggatgagggctctggggacggcaccagttttgaggcctagacgtaccacagattcacttggaaagtcacttcattctgggcctctgtggctcagctataaaatgggtggcctagtggtacctgctaatcagggagtccttccactggtcatgctctcaacagagattaattagggcctttctgagcccagccctgagcagggactaaaatatgttcctgccctttagaagacaaatctggaagctgtgccatcccaaccccctcacagaaccaattgcatgacattctaattgccagcctctccctgccacccccatcagactgacagttttttgaggacagggatcacatctgatgcagccatgtgtccccaaggcccaggacaggatctggcatgcaggaagtgctcaggaaatgtgagcgagggaggggtagatggacagatggacaattaaatgaacagagtcagaaataaagaagacacagtcccaaagattagaatactgggaaagacatggacggtcatgtcagtgtcggcagagtgtgatggggatcagcaccaagagttgcaggggcccagggggtcctaacccagcttgggggaatagctttcttctttcaaatgccaacactgattcaggcacttgctgtgcaccaaggccacatggcttgaaagtggcagaaggctgagacatcaccgtggctgcacatttccaagtggctctcaagggtagggcagggggctatgaactgaatggctccccagggcaaagccaggctgtgggtggaaattacaggaagcagatttcaggtggaaggagctgcttctgcaggtagtgagtgcctcatctcagggggaatgcaagcgcgggcctggccagcccttgggaactctgatgagtatttcttttttttttttttagacagagtttcagtttcactcttgttgcccaggctggaatgcagtggcgcgatctcggctcactgcaacctccgccccccgggttcaagcaattctcctgcctcagcctcctgagtagctgggattacaggcacccgccaccatgcctggttaattttttgtatgtttaatagagacgggattttatcatgttggccagactggttttgaactcctaacctccagtctgcctcggcctcccaaagtgcagggattacaggactgagccactgcacccagcaattttttttttttttgagatggagtttcacacttgtcacccagactggagtgcaatggcaggatcctggctcactgcaacctccgcctcctgggttccagtgattctcctgcctcagcctcctgagtagctgggattataggtgcgagccaccaagactgaccaatttttgtgtttttagtagagatggggttttatcatgttggccaggctggtctcgaattcctgacctcaggtgagcacctgcctcagcctcccaaagtgctgggattactgacgtgagccactgcacccagccatgagatgcattttgaacgagatgatcttcggggtctaacaaagcgctgacttcttatcatcttatatgaaattccagaaacagtgagactattttctttttcaataggaggaaactgaaatccaggcagtatgtgatatatttagggctcttgtggttctgaaactgcttccttggtttagaagcattagggagggtgatgtgtgaccgggcttcctctcaaaatggtatagttgggtctgatcatgtaacaatgccgcagaaacaccatgagagggtagccctgtgggccctggagtctgtgctgcctgcttgggtgacaggaggtgagtgggtggcttagcaacagtttctgagcagtgatgtacaaggccatgttcccaagggacagtggggatagtggggctggactagcaagtggcttgtaggcagaatgcactggccctaggctgggcagtctgctgagggtttatgggaaggctgggtggggctggagtgggagtcctggacattaccttccctttgtggaaagtgggcctctgacacagagggcatggagaatggtgcagtacctgtgtagacatggcccttgggcagtgtgcatgtgtatgctatagagagtgggaatgctgtgtacactgaatgagtgggcttggacatctgtggtgacatgtgcagtctggtgaggggtatgctgtgtgcatgtggaggcggggacagtgcaaggtagatacacgttgagatgtgtgtccacagtgcagtagttgctggcgcgaatgtccagagggagggtagtgggaaggtgggtgtgctctgtgtatatgctgcatacttgtgggggggggttgctgtgacaaagtggctgctggtgtgtgtccttggtgaggtgtgtggtacactgggggtactcactgaggggcatggggcatatgcttgttctgtacattttgagatatgtgtacaggatgaggcatgttcactctgtgcacaggctgtgtgtgagtgctgagatgtgtgcatttttcatcacacagtgaccatccattgtgtttccgtaacagtgtgaatgaaatggcgaggaatgtagcctgtgtgcactgccctggggcagccagcagagcccggctcagaaggacagggaaggtcccctcggttggttactgccaccataaccactggagactgggggaccagggctgccctcacagctgtgacctcacctgccctatcacagccccgttccacggacggagtccctgaagttcagatgggaaaactgagccctttttccagctcaccatgtggctacctgacccggggaagcacctctgctctctgtatctcagtttccccacctgtgggacaaagaatatccattggctctgggatcccgtcccccctcatgctgatgtgccagggtcgtctgatcccccattctaggctcaggctctggatcctggtctggggcctctttctgcaagtgccttgcgtccctcaggcctggtgttctcatctgtgcagtgagatcataagcatcccctgagagtccacgtgaagtgactgtggggctaagtagagatggctgcagtggaggccaccatgaccacagggcctagggcattgcttctggggcaaacccagcctgggatccatggagaaatcccaggctggagaggctctggaaccccggtattcctcccagcccagggctctgctctgctgccccgaggtttcaaaggcgggaaacccagcacgtgagcccgaattctgcagggaacgagggagcttcaggtcccggagatgggggttctcgccatctgctcattttctgcggtggccccactgagtcctgtgccccatccccaggtgcccggcggcggcggcgagtggagcaccacgctgctgtccccacgcgagacggatgccgcggccgagggccctatcccgtgccggcgcatgcgcagcggcagctacatcaaggccatgggcgacgaggacagcgacgagtccggcggcagccccaagccctcacccaagaccgcggcgcggcgccagagctatctgagggccacgcagcagtcgctgggagagcagagcaacccccgcaggtaggcgcgcagctccacccttacggtcccgcccagaggcaagccccgcccactacgagtcttgctccctgggaggagccctgcattaaaataagccccgcctgcgtgggagccacgccccctttgagccacgcccactcatgagtcctgcttcttgagagaaccccttcattgaaataaggcccgcccggcgcggtggctcacgcctgtaatcccagcactttgggaggtcgaggcgggtggatcacttgaggtcaggatttcaagaccagaatagccaacatggggaaaccccgtctctattaaaaatacaaaaattagctgggttggcggcaggcgcctgtaatcccagctactcgggaggctgagacaggagaatcgcttgaacccgggaggcggagattgcagtgagccgagatcgcgccactgcactccagcctgggcgactgagcgagactccgtctcaaaaaaaaaaaaaagaaagaaagaaaaagaaaagccccgcccgcgtggaagcccctcccagaggcttttctccccacttcgggtgagtcccgcccacttgtgagccctccaggggaaaacctctttcagtaagtacaagtcccgctcacccgcaagcctcgtcccctaggtgaacccctcttagttctgcccctaccccaggagtcccgccttcctcccattcggctgttcccccggagatcccagcccacagatgaatcctgtccctcagcttcagatccaggtgaactcactactataatgatccaggccccctaagtgaacccgccatcaggttagctccctccatgagatcctcaggttggccctgcactctgatgaattgacctcgaagagcccggccaattggagaactaccccttgagccccacccacagttcagccctgaccacaggtgagctgcatcctttggtaaaccccgatcatgaaagccacactcgggtgataggtccaggtaaacccctcccacaggagccacatccccaggtaagttccactcccagaggggaactgtcccacgggatcttggtcttcaggttaggagaacctgccctgagtgagtgcatcacctgtaacagcactgcctagggaaggccaaagcccgctctacccttgctcctgtaactgatccctgtggggagttccgagatgggggagggaggtgaatccagaagccaaagagtgatagacagacttttcctgtcccagtgcctgcctggaattcaccagccaagccccatcgtgttgctgtaaggcttggaggagttagagggaacaagcttctccctagatcttcaactaggggggacaggagccaaggcttcatggaggaggtggcctgggaagactgagacagagggaagagaacaggtcaggtgacactggtacctaggcaggaagagggcagtgttctcagagcagccaggagtctagttgactgggcagaagatagagaatggcctccaggttggaattaaggacaccaccagacaatcccaggtctgcccttttctgaaccttagtttctccatcttttttgtggggatgtggggaacagggtctcgctatgtcgcccaggttggagtgcaatagtgcaatcatggttcacttgtcgacctcctgtgctcaagcagtcctcccacctcagcatcccgagtagctgggactaccagcatgggccaccatgcccagctaatttttttaaataattttttgtgaccaggtgcagtggctcacgcttgtaatccctgcactttgggaggccaaggcaggcagatcatttgaggtcaggagtttgacaccagcctggtcaacatggcgaaaccgcatctctactaaaagtatataaattagcagattgtggcggtgcatgcctataatcccagctactagggaggctgaggcatgaaaatcacttgaacccaggaggcagaggttgcagggagctgagatcgtgccactgcactccagcctgggtgacagagtgagactgtctcaaaaaaaaatatatatatatatataatatatatgtatgtatatgtatatattgctctccccttgctcatcagccctcacactgtccaggctggcagtgacttccatttttccctctgccactggatgaccttcgccagtctttttccctctgggcctcagtttcccaatctgaataatatatacatatatatgtatatattgtaaagatggggcctcactatgttgcccagagtggtggtgaactcctccgctcaagtgacccttctgctttggcctcccaaagtgctgggattataggtgtgagccaccacgcctggtcagtttccccatctttttttttttttttttttttttgagacagagtcttgctctgtcgcccaggctggagtgcagtggcacaaacttggttcactgtaacctccacctcccgggttcaagcaattctcctgcctcagcctcccgagtagctgagctgacctcaggtgagctgcccgcctcagcctcccaaattgctgggattacaggcgtgagccaccgcacctggcctagtttccccatctttaagtgaaggggctgagctggaggatctctaagaccccttctagtacggagatcctacaatccgagtgaccagtaggcattaaggtgggagaggcaggaagcctggggcttaagcctagaattcaagggaagcaataataataacagtagtagtagtagcaataatagtaacagctgccgtctgttagcacttgtccgctggccactgtgcctgacctgatatcctttaatctgcaccactgaatcctcactgcagccccagcaggcaggtagcatcatccccattttagagatgaggaaactgagacttaagtaaggggtaatgacttgcccagggtcacccagctgagaaagctggattccaatccaaacccttctgtatcaggggcctaagctattggatgcttggattttatccccagaatgaggactgggggatgcccaggatcaggtagatgtaagaaagattgaagggctggggccgtggagataaggggtgagtctaggggcctgatagaagccactcgaacatcgcagcagagctgatgccctttgggagccctaggctgtggaacttgacccacctctgtcgggcctctggaaatgtcccagactttcaaggaggaaggaaaggggctgtagaattgggcagggccagcctcgggttttaaacagtcaaatacaagctggtgctgccaccctgcggctgcagcgggcatcacaggtgtggaccacctgtgcatcacagatggtcaaggcctccaaaagctgggtgaacaatgggtgggctgagccctgtctgctccccactccccaccaggagtctggaccgcctggattcagtggacatgctgctgccctccaagtgtccgagctgggaagaggactacacccccgtcagcgacagcctcaacgactccagctgcatcagccaggtgagggtggcagggaggctggagagtcagggggcttgggtactgattcccatctgggaggaggacacacgcccaggcccagcccatgctgagtggcccccagatgtctgcactgtgcttctgtttggtccttgttcctgaagcctcctgtgtgtgtctctgccccaccaactgtcctgtggctggagagcacagttacggggcctgacccaggaccccacaccaccactgtaaacacaggctgccagcggggcgcctgtcacttctcattgggttcagaaccatgaggataaggaactggagacctaggttcgagtcccagttttgtcacttgacagtatgaacccaggatagtcacctcccctccctgaacctcggtttcctgatttaccagaggagggtgagcatttctatctgggggctgttgagaggaataagtgggatcgtgaaggcggtgtgctcagcagagggtagctgccttcctggttattattagcatcttttgtgacctccagcaagtgactgctcactttgaacctctgtgccacctactcagtgggcagttgtgctcccaggcgcagccagccctgcctgtgtcagtgaggagcatactgggctgaacgttgaatttgcatgccaccctctcaaccatcagctccttgagcccttaaccacccccagaggtggccttgttatccatatccccatttcataggtgaggcaactgaggctcagagaggtgaagtcatcatgcagctaggagaagacaaagttgggcagggatctggggctgtccagcccagacctggacctcagctcctgccgtgtactcggcactttagggtttgcaaagggagaaccaggcaggactaaaaggcaccccccatcgtgtggatggggagatgagccccccgagaaggcagacacctactggtagtagcagttaggcagtggggcggccaggtgcgggtccagcctcctctcagcaggaacaggccactgtgtgcaggcccaggaccacggctagaggactgcttagaaggctttgggaccccgactcctcacaactccattattcctggcctagccaagctccttccccagcccctcagacatggggaggggtagagtgccgcagcccagggagccccctgcccctgcccccctcatccagactccaccaagtcacacctgaacagccgtcctccaatccatactcagtggccagagggagctgtcagagccacacccctgctccagaccctcccttggctcccacctccccctgagggaaagccagagtccttacctggacctgtgaagccctgtaagacctaggccctgcctccctgttggatcctgtcccttgccctgctccagccatgccggcctcctttctgctccttatatacgagtgtgccatgtcattctgctccaggccctctgcatttgctgtttcctcttccaggggctctcttctcaaatctttgcacagctggctcctcctggcgtttcaggtctctgctcgaatgtcacttcctcagagaggctgcctgtgatcacttgtctaaagtagccttcccaggcgctgttcccttaccctgctgttcccttaccttatcactgcctggaactagaatcatttgcttatttacttaatgctgtctccctcttaaaactaggatctcctgggagcggaggccttgctgtcttgttccctgcagtgtccccagtacctggcacagtgcctggcacagggcagatgcttagtaggtgtttgctgaatggacggcatccctccctgtctctcccatcccaccacgttttctcgtctcagtcttcctgtctgtgtctgtctccgtctgtttctctctctctgttctctctcccctcattcacatttttctctgattctctccagcgtgtctccatctccatgtctctctctgtgtctgtctgtctctctacacatcccatctccacccccgcctgggcctggcacccaggacacctttgtcctttaactacacaaaaaggcttattaatcggccaggctgggggccgcagcaggtctcacccaccacccgctgcccagtcccagttctctcctagtccaggatcctctgacccctcacagcctcaactctagaagtttgagtgacccaagccatatatttggccccaaagtcagagatattctagcctggggaagagcaggctctgggctccatccctaatctgtatctccaggtgggctgcctgccagatgagaggcagcagacagaggatccatggtcccagggcccagacctaaagaaggacttttatttatttatttattttgagatggagtttcgctcttgttgcccaggctggagtgcaatggcgcgatcccagctcactgcaacctccgcctcacgggttcaagcaattctcctgcctcagcctccctagtagctgggattataggcatgtgccaccatgcccggctaattttgtatttttagtagagatggggtttctccatattggtcaggctggtctcgaattcccaacctcaagtgatccacccgcctcgacctcccagagtgctgggattataggcatgagccactgcgcccagccaagaaggacttttaaatagcagattataagtcctcagtaatgcccagccccagaaggagtgagcctcccatccctggaagaagccaagtgagacctcctagcagctgtgtcccagccagtctggggaggaggttagaccagccagcttcaagtttccttgcaattgaccctgaatcccccaccccagccccagccctggtccttccataaccctcaccctctctttcctgcagatttttggacaggcctccctgatcccccagttgtttggccatgagcagcaggtcagtatgtttgcccttctcttccaccccaatcccagagtgtaggcctgggccttaggcctgccctctgagtggtcccagcacccggcccaggctggtacaagcagagccatcaccaggaaagccacttccagtggatggagttgagggtcacattggtgtcctgactctccactccctacccttattgcttcacctctatgtgcttcagtttcctccttttgaaaatggggaagaatgagctaggtgctctggatggggcaagaaacaactccaggactcctgccctcctctctcctcccagaaagcctgggtcaggcctggggagactgagttggacaggtcaggggctgggggctgatgatattagcttccaggtcccagcccccagatcccttggcttttctcctttctggagcgccaggaggacatttaaagatgttggggtgttggagtgtgtgtggagactttccaacttcacacaggttggtgaggttgtgctgctcatggcactgtggctgccctgagggcaccacctcctagacattcctatcctgcccctggaagtggccctctcctccctcccaggccaaagaccaaaaaccaggggcaggaaaggtactctgagatcaaccccactttgtagccaggagtgggtaagggacttgtgcaaggtcacacatcccacaggggcaaaactaggaccagacctccagctcctgattccagccgtggatgccccatgtgtccctctcccccatgtcacagaagctgtgtgttcctcctgaacacatgattcaagaagttatttaaagagcccacagtgggccaagcgacctcttcctcatccacctttaataggcgagtggtaaggatgtgatgcgttaacatacaaagcccccaggacagtgccccctacacagtaaatcctcagtgatacacataccagcagcgctgaccagctggcctccccaccgacagctcaagagcatcttaaccaacactgacagactccacagtgctacctgtattcgtgggtagaggttactaggtgcatactctcttggactctatcctaagcctgtgatatgaattctctcatttcatcttgaccacaaccctgaaatggggactattgccccattttataggtggggaaactgaggcacaaagcaattaagtgacttgcccacgttcacattgtgaggaaacgatgggccaagggttggacccctggcagtctagttccagagccatgtggttcctgtgtgatcccaaagcaagaccccatgcccccggcagtcacaagggtctcttcataacttcaggctgcagttttggaggagaaacacctatctctttaacactccttctgagtgaattttggatatgccacatggcctatattttaatttatcagtactgtacagtagaactttctgtaatgatggaaatgttctataattcacactgcccaatgagatagccactagctatatgtgactttatttatttacttatttttgagatagggtctcactctgtcacccaggctgagtgcagtggtgcgatcatggctcactgcagcctcaacctcccaggctcaggtgatcctcccacctcaacctcccgagtagctgggactacaggcacgcaccaccatgcctggctagtttttattagagacagggtctcgctgtgttgcccaggctggtctcaaactcccgaacacaagtgatcctcccacatcagccccctcaaagtgctgggattacaggcgtgagccactgtgcctggcttacctgtggtcttgagcaagtcaaatgtggctcctgtgactatggaactttatttaattttaatcaaaaaaaatttttttttgagatggagtctcgttttatcacccaggttggagtgcagttgcccagtcttggctcactgcaacctcctcctccagggttcaagtgattctcctgcttcagcctcccaagtagctggcaccacaggcatgtgccaccacgctcggccaattttgggattttagtagagacaggatttctccatgttggccaggctggtcttgaactcctgacctcaagtgatctacccaccttggcgtcccaaagtgctgggattacaggcatgagccaccacgcctggactaatcaattattattattattttttaatttttttagagacaggatcttgctttgtcccccaggctggagtgcagtgtcacaatcatagttcactgcagcctccaactcctgggctcaagttactgggacttgaggtgcatgctaccactcctggctaatttttgtatttttaatttcttttgtagagctggggtcccactatgttgcccaggctgaattttaattaatttaaacccaaatagccatacatggctcatggctgccatactgaaatgcacagatttggccaggcgcagtggctcatgcctgtaatcccagcactttgggaggccgaggcgggcagatcacgaggtcaggagtttgagaccagcctagccaatatggtgaaaccccgtctctactaaaaatacaaaaattagccgggcatggtggcacctgcctatagtcccagctactcaggaggctgaggcagaagaattgcttgaacccgggaggcggaggttgcagtgagccgagatcgcgccactgcacttcagcctgggagacaaagcgagattccatctcaaaaaaattaaaaaagcacagatttagacctttccatccaccctccaaattgggtgaacacccatctagttgtttgacctgatgcagtctcagatgagaatgcgagcacctatttcatgtagatgaggagaaactgacccagagaagatagtgatggcctgaggttacacagctgggtgggacacagctggccccaggcccagatcaaccttttcctccacatggtcagtcagcttgtgccccctcccgctgtggcccaggccagcccccaagatgtccacatctttggccaactgaccccccagcttatcctctgtggtcttcagttaccaacatggcctgagacatgggtcagatagcccttccagaaccctcaaagagtatgtgcatggtgaggcccctcaatgctcatacccttggcttcagattttcagggtcctagacagtcatttctggagaaatacttaggacccatctacacaaagttgaactagatgcaagatagcagatagcatacacatcaccattttccatactgtccatggcagacatcattaatcaatcctcactgcaactaccctcactccagttttttgcttcagcttcgtctctggcctctgcctccattccagacccctttcccaacatccattctgtataagagggctagattaatcttccttaaatacatatttggagtgttggttctgccacttcctcactgggtacccatggcaagtgtcttcccctcactgacccttggtttctttccttgtaaaataaagggattggaccataggatggtaaatatccagctacctaccgccacccccattccaacattcaggacagacattgctaattgattatagacctctttcacactaaattcagatgtgaccttgaaatctattaatcagtgtggaccctgatttttatcacagttaatatcctgagatattccaactttgtcctcattatagagatgggaaaattgaggcccagagaggtaggactgtttctttcttaagggctccatctccccatcccatacgctgagtgagatggacaggggtgggctgaggtcagaccccacagactgtccagccctgccctgagcccaccaccaagaaccgctccccccaggatgggcaagatagccagctccctcatgcctgcctttgcctggacaggtacgggaggcagagctgagtgaccagtatgaggcggcctgcgagtcagcctgcagtgaagcggagtccacagcggcagagacgcttgacttgccactgcccagctacttccgctcccgcagccacagctacctgcgtgccatccaggcaggctgctcgcaggaggaggacagtgtctccctgcagtccctctccccaccgcccagtaccggcagcctcagcaatagtcgcacgcttccgagtgagtactgtgatgagggaaggggttttttttcttttcaaggggaccccaaggaccatacctggagggccagcctgggaggatacagggaggaatctgtctcaggctggcccgcaccagggggatggttgggagcaaaagcaggaggccttggagctgaacttccagccaattggccactggagctcaaatgggggtcccagaggcagatgccacccctggggggcatgggaggtattggaggggctggagcttgtagggtacttggttgctccttggctcagagcagccacctgctatagtcagggcttactgcagcttgacctgcctcttggaattagttcaggtaggcaaacctgtagggcaggttggaacctgcagagaagcctgcagtgagggtggggtctgcactgagccttctcaaagggatgtgttttacaggcttctctcatatacacaatcagggaataccttctggattcttgggtgttttgttgttgttgagacagagtctcactccacacccaggctggactgcagtggcatgatcttggctaactgcaacctctgcctcccaggttcaagcaattctcattcttcagcctcccaagtagctggaattacagacacatgccaccatgcctggctaatttttgtatttttagtagagatgggatttcaccatgttggccaggctggtcgtgaacttctgacctcaagggatctgctcatcgtggcctcccaaagtgctgggattataggcgtgagctaccatgcccagccctggattcttgttctaaatcatctgaagataacccatatgtgatcagagaaaaaaggggaccctgtataactgagcaagccatgaaataatagaaaattgcatgttctcactcataagtgggaggtaaacaatgaggacacagggaggggaacatcacacaccagggcctatcaggggggtgggggggggggagacaaggggagggagagcattaggacaaatatctaatgcatgtggggtttaaaacctagatgatgggttgataagtgcagcaaaccaccgtggcgcatgtataccttattaagtattattaagatggtcaaaaaaaaaaaaaaagacgtaatagaaaattagctgggtgcagtggctcacgcctataatcccaacactttggggggccgaggcagatcacttgagcctaggagttggagaccagcctgggcaacatgatgaaacccggactctaaaaaaattaaaaattcgctggtcgggttggcatatacctgtggtcctcgctactcaggaggctgaagcaggagggacatctgagcccaggagatgaaaggtgaagtgagctgtgttcacaccactgcacttcagcctaggagacagaccaagaccttgtctcaaaataataataatagaaaatcaaaaccaaggaaaaacagcacaatttattgtttatcaatagtagagagaggtttgagcttactctggcaagctagttcgccttcctgagcctcagtttctccatgtataaattgagggcataagccagactccagggatctcttagggagatgaaacaagactgtgcataggacatgtttaggcagggactttcttgtggtagaagcttggtaagtggtagctgttattgttggttctcagacctgactctgagcttcctgaaaatcaaaaacaattgggggctgggcatggtggctcatgcctgtaatcccagcactttgtgaagccaaggtgggcagatcacttgaggtcaggagttcgagaccagcctggccaacatggtgaaaccccatctgtactaaacatacaaaaattacccgggtgtggtggtgcacacctgtagttctagctacttgggaggctgaggtatgagaattgcttgaacccgggaggtagaggttgcaatgagccaagattgagccactgcgctccagcctgggtgacagagcaagaccttgtctcaaagaaaaaaaaaagcaattggggttggattgttgtaggaagagaggcactgcttcaagtgctcaaccggtgtttgatgtaaataaatgtcttctctgttccttgttcacctctgtttctggttcctccacttgggaagggatggtagccagggaggtgtcgtctggcatcgggactctctgatgccacatactggctctttctcgcaccctgcagggtccccagtgccatctttcccagcatgggcaatcttcattcacctcactgtttcttattccccctcagcttctccatctggcagtctgcctcctcgccactcagcttctttctgctagggcacctggccctgctagtcaggcatcttgggtagaatcctctgaagacaactccagccctattttccctcttggtgaccacttaatgtatttgaaaacaagggcctttgccttctgggactctgaaaatatagactggtctgctacagcctccgaaaatacagactggcccgctacagccttccttctagtcctgctgttaccggtagccctgccagcctctccaccttcaaggtctccaaacaagagctgaggcccaggttctgtggcctccacatccagaagagctctcccaggctgtcccaggcactctgctacagttccaaaggggccgtgggtgaaggataacatcccccacatcctcacacccatgcgaagttctctaagcatgaagtgggcctggagggatagacagcacccctagcaattctcttcaaataaaccatccctcaccagtttttccaaccccagtcactcatgaatggactaaagataggggatgggctacatgtcccaatactgcctgggtccctgtattggtcagctcttgctacaattatgctgcataacaaacaaccacaaaatcagtgtaatacaacaattcacatttatttcttgctcccaagtttgtcagttgggacagttctgctccacatgtctttcatcctcctcctgggaccaaagagtcctcctgggatcagtggtctagccagggcatgttctccttatggtgatggcagaagacagaagagcaagcctaactaaccaaacaagcacatttcaaggcctctgctcatgtcatacctgctaacatcctattggcaacacaagtcatatgactgagctcatagacaagggatggagaagtatcttctcacctttgtgtaggaaactatattcatatggcaaagggtgtggccacagggagaggtaaagaatcagggtctgggtgggcgcagtggctcatgcctgtaatcccagcactttgggaggccgaggcaggtggatcacttgaggccaggagtttgagaccagcctggccaacatggcgaaaccctgtctctactaaaaatacaaaaattagccaggcgtggtggtgcccacctgtaattccagctactcaggaggctgaggcaggagaatcgcttaagcccgggaggtggaggttgcagtgagccaacatcacactattgcactccagcctgggcaacaaaagtgagactccgtctcaaaaaaaaaagaatcagggtcaacaattctatgttccatgatccactgtcttggctgtatttactcatgcccttcccaggtagaaaacttttattcccaagacccccaaaagtctcatccaatcatgagattggatcagactcttatgatctatgtcaggtctggatgtggcttctgtcgaacaattgacttttaattttttaaagaaactacttatctaccctacagtctaaccctccccaaccacacagcatacactggtgaaacagggacaggagaactgcagttaatactcctgttcagaaaaggggaaagtagagatgcagagacttattgatccatggcaattctgaagtccttctgagcaactgttgggcaaatgcgttgagatttgttgattaggtacaagttctccctggggttgatcttctagtctactgttctccacagctcttggttctgctctctgaaagcccttccttctccatcagcatttttggccacttttaaagagaacttggagaatatagccttggggaacggaacacctttcttagcttgcttccttcctaaagaaagttagggagctagatgtcttttgcatcttgaacggtcttactccctttagcctaagctggtcaattttacccatgcacctacctcaaacatttgatgagttttctatgtatttgattccctgtaacttcgagtgccaaaagccatacccataattgtttttgagtcatgcctctctcttgacttgatgcctactttgggcttctgtgggaccatgcccttaagctttctgtaggcccttttgaccagatagtagcatctgctacctggtatcttgattgattgattgattgagacagagtctcgctctctgtcgcccaggctggagtgcagtggcgcgatctcagctcactgcaacatctacctcccaggttcaagcgattctcatgcctcagcctcccaagtagctgggaatacaggcgtgtgccaccatgcctggctaatttttgtatttttagtagagacaaggtttcaccatgttggccaggctagtgtcgaactcctgacctcaagtgatccacccgcctcggcctcacaaagtgctgggattacaggtgtgagccaccacgcctggctctactatttttagagtgttaataagagatattataaccacactttgatttgatcctgtccacatacggcatcttaactggccatgaccttggtttcatctttgccctgaggctgtatttttttttttttttttgagtttcgctcttgttgcccaggctggagtgcaatggcgtgatctcagttcatctcaacctccgcctcctggattcaagtgattctcctgcctcagcctcccaagtagctgggattacaggtatgcaccaccatgcccagctagttttgtatttttagtagagacagggtttctccctgtaggtcaggttggtctcaaactcctgacctcaggtgatctgcctgccttggcctcccaaagtgctggaattacaggcatgagccaccatgcctaacgaggctgtatcttaatttgagaatggtttactctctggaggggctggagttgacaaatttattttccaactaaacaagttctggtctccttccctttcctctaaacgctccttgaagatcggctattttttacttttttagacaggatctccatgtgtcacccaggcatgggtgcagtggcatggtcatagctcaccatagcctcaacctcccaggctcaagcgatcctcctgcctcagcctcccgagtagctgagaccagagtcatgcagtaccatgcctggctaatttttaaatttcttgtagagatggggtctccttatgttctaccaggctggttttgaactcctgggctcaagtgatcctcccaccttggccttctaaagtactgggattacaggtgtgagccacggcacttggcctagctatttcttttgagttcctccttttcttgtaaatctttttttttttttttttagacagagtcttgctctgttgtccaggctgaagtgcaggatctcaactcactgcaatctccacttcctgagttcaagccattctcctgccttagcctcccaggtagatgggattacaggcatatgccaccacacccagctaactttcaaatttttagtaaaggtggggtttcatcatgttcgctacgctggtcttgaacgtctgacctcaagtgatctgcccgcctcggcctcccaaagtgttgggattacaggcgtgagccactgcgcttggcctttttcttgtgtaagtcttttttttttttttttttttttttgagacagagtctccctctatcactcaggctggagtgcaatggcatgatctcggctcactgcaacctctgcctcccaggttcaagccattctcctgcctcagcctcccaagtatctgggactgcaggcatgcgccaccatgcctggctaatttttgtatttttagtagagacggggtttcaccatgttggccaggctggtctcaaactcctgacctcaagtgatatgcctgccctggcctcccaaagtgctgggattacaggcgtgagtcaccacgcctggcccctttgtcttgtaagtccttaacaaatgcagccaaaaggagcaagctcaggccgggtacagtgctgagcacggtgctataatcccagcaccgtagggaggatctcttgaggccagaagttcaagaccagcctcagcaacatagtgagactccatctctacaaaaaatttttttttagttagccactgcacttcagcctgtgtgacagagcaaaaccctgtctaaaaagaaacagaggctgggtgcagtggctcatacctataatcccaatgctttgggagaccaaggtgggaggatcacttgagcccaggagttcaagatcagcctgggcaacatagtgagaacctgtctctacaaaataaaaaaaattagctgtgcatggtggtcacagctacttgggaggctgaggtgggatttgcttaagcctgggaggtcgtgctgcagtgagccatgatcatgccactgtactccagcctgggtaacagaatgagactctgtctttaaaaaaaagaaaaaagaggctgggcacggtgggtcacacctgtaatcccaacactttgggaagctgaggtgggtggatcacctgaggtcaggagttcgagaccagcctggccaacatggtgaaaccctgtctctgctaaaaatacaaaaattagctgggcatggtagcgggcacctataatcccagctactctggaggctgaggcagaagaatcgcttgaacccaggaggcggaggttgcagtgagccgggatcgtgccattgcactccagactgggcgaaaagagtgagactctgtctccaaaaaaaaaaaaaaaaaaaaaagaaagaaagaaagaaaagaaaaagaaaaaagagtccgggcacagtggctcacgcctgtaatcccagcattttgggaggccgaggtgggtggatcacctgaggtcaggagtttgagaccagaatggccaacatggcaaaaccccgtctctactaaaaatacaaaaattagctgggcgcctgtaatcctagctactcgggaggctgaggcaggagagtcacttgaacctgggaggcagaggttgcagtgagccaagatcgcactattacactccagcctgggcgacagagcgagactctgtctcaaaaaaaaaaaaaagatagaaagaaagggcactccttaagacacttaacagccatctgttgaaaaattgtcatgtcacactttttgttagaataaggtcctttacttccatttgccagaaatttgtcataataattatataattaaattatgtctatgtggtgaatggctccccccgatatgtagcatccttgatcagtataaaacttgtacaaccatatatggcgagcctgcccaaaatcactccctccacagacaaacaccagcacacacaggcacatcctcaccactgtacatccagccactgtctccctactgggtcacccctgctcagaaggctgcccccttactcctcagcatctgtctccaaggagtgagcaatcgggtcctttctccacccccagggctgttctgagcccccacgttgctgaagggcatgaaagctctgtccttctcacagaggcatctgtgcactcaggtcctgtgcaggccggtgggttgatgtaggggagcggcagttattgaggcagtgagagcccctctcaagcagggcgtgggcagggtgaggagctgcctgcctgcccgcccacccacgtggacctggccaattctccactgccagtgccactactgctgtccctgttctccctccccctgtctgacccagattccacattccagaaatagctctggcaggtgactggcaggcggggtcagctctagctgggatggtgggagaagcagccgctatggatgcgtgcccctccccagccaaaggacctatctaggagggggcttgggggtgccatcactccccagtctgccccctcctgcctctcttctctctatgcctctgagaaaaagaagaaaggagaacagcctccctcctcctccctccctcctcttactctgccatctccctctctttcttccagcttcccctcccttcctctccctctttctccccccaccatctttgccttctgtctgtctccctcagttctctgcttctccctcccaccctctctgccttccttccctctcagtttctggccctcctccccgtcctccctttctgtgtctctcccactccctctgaatcacagggaggctgtgatgacagccagtggcctgggcaggcaaggtggtgggctgcagggtgtacccccactcctgccagctgcattctctgcacctgagtgtgtgcaagcacacaggcacacacacttgggctcactccctgacagtgcttgtggctctaggctgacctgggatgggctccaggcctgggaaccacccttgctccttgctcagggaccctgagttctgtgtcactctgagtgggcacctgcccttccctgggcctcaaagtctctatctgtgttgtgaggccttggtttggggacccacaggtacctcccatctgtgacaatccagtcatcagctgctatgcctgcccctctttgtcccatcttccatcccccagcttcttctctgactgccctcctacccctaacctccccccggcaccacacactctgtatacaggaagggaggttgataaaattgcagtacacagtcaaccctccagtcaaccctgtcccccaaccctaccctgggcccacctgtcccctcactccaccgcaggctcttgtcagcccaacgcctctagtctccacagtgtcagggctaagaggaaactcaaagaccatcatgtccggagattgcaaatggacttcaaccatgtgtcatctctgatccctggagctcagttctgagatttggttaagcaaagaaaggtgccaccatcgattcgcgatgtctaccgtagccagaagagttacatacatctgcaattcctgatctaacccacttatcccaacatgcacgtgcgcacacacagacatgcacacacatttacagatatttcacaaagaaacatcagcctagggaagatgattatctatcaaggtcaaagtcagccagctagtaggtcagggagcagtttcctacctgggtgtgcctgacttcgaagccctgggttctccattgccccctgtgcgtgggagccacccagtcctggtaaagcagtacaagcatgggtaatgaaggtatgttacaggagttgcaggggaagtcctctagcaacatgggcaggatggattagaggctgagaggccactcacaggttggtgcagtggtctaggtaagtgacagtgaggtcaggacaggggccatagggtcagagaataatgggaggacccaggaggccttcccagaatgaataatgaggaaccacaattccctactgctgaaacaggcacctctccacagaggacactgggcagaaggcaggcttcctgtctggggtccaccaacccttggactacgacatgcctgattaattgagtgcctactgtgtgctgagtatatggatcctcactcttccatgtcctgtttttagcagatccactcagccttctgggggaaatagtgaccaggactgaaggactggtgggcaggcctccaatcccaggattgagactcttgagacaagacaggggcattctgtatcccctcagggggtagagaagtcaccccaaaggaagagagatgaaggtgtttaaatagaaccttggaggccctacggcatggtggttaagcacctgagccttgcaatcaggcatctttcactgatagatgtttattgatcaagtgctctgggccaggctgtgttgtaggtaccatcagtgagcaaaatggaaatccttgccttcatggagattgtattctactgggaaggggaagggcagacaaaacaataaacataaataagtgtgtggtttgttggtagttggcacagcataaggggtcctgggagtggtggcagagtgcagggaggggtgccgaggtataaacagggtggctagggtacagctcattgagagggagattttgagtgaagacttttttttttttaagacggagtctcactctgttacccaggctggcgtgcagtagcgagatcttggctcactgcaacctccgcttcccgggttcatgtcattctcctgcctcagcctcctgagtagctgggactacaggcgctcgccaccacgcccggctaatttttttttttttttttttttgagacaaagtctcactcttgtcccccaggctggagtgcaatggctgcaatgtccgcctccctggttctggttcaagcgattctcctgcttcagcctcctgagtagctgggattataggcacctgccaccacacctggctaatttttgtatttttagtagagacggggtttcactatgttggccaggctggtcttgaactcctgacctcaggtaatccgcctgccttggcctcccaaaatgctgggattacaggcatgagccaccacgcccggccaattttctgtatttttagtagagatggggtttcaccgtggtagccaggatggtcctgatctcctgacctcatgatccgcacaccttggcctcccaaagtgctgagattacaggcacacccagctaatttttgtatttttagtaaaggggatttcaccatgttggccaggctggtctcgaactcctgacctcaagctatccaccccacctcccaaagtgctgggattacaggcatgagccaccacacccggattgagtgaagacttgaaggaagtgtgggaataagcagtgctgggaagcgctccaggcggggggtgagtggtacaaaggccctgaggcaggaggtgcctgacaggctggtggggggcagagcactgaggagagagccatggtaagaggtgaggttcgaggacagggaggggagggttgggtctggccaccgactgtggaaacaactttgtcttttggctctgagtacaagggggaaccactggggcactggagcacaagagtgacatgacctggtgtgtgtcttaaaagaaacactcagaccgggtgcggtggctcacgcctgtaatcccagcactttggtaggccgaggcaggcagatcacctgaggtcgggagtttgagaccagcctggccaacgtggtgaaaccccatatcttttttttttttttttttttttttgagatgaagtcttgcttctgttgcccaggcttggagtgccatggcgaggggtttcaccatgttggtcaggctggtcttgaactcctgacctcaggtgatccacccgcctcagcctcccaaagtgctgggattacaggcatgaaccaccgtgcctggcaaaacccctctctactaaaaatacaaagccaggtgtgatggcacagatctgtaatcccagctactcgggaggctgaggcatgagaatcgcttgagcctgggaggcagaggttgcagtgagccgagattgcgccactgcactccagcctggcaacagaatgagactccgtctcaaaataaaaaaaagaaaagaaaaagaaaaaaagactactcagggggctgcatggagccacgtttgaggggcgagaagtgggtgatatgggaataccagggtgatgatggtggcttaggcagggtggcagtgagggaggtggtgacaactcactggatcctggaagggctctgaaagtggagtcaacaggattctttggtggattggatgtgggtgagagtgaaggagaacagctaaggggtgatgagaaggaatggttacacagccaggtcgcgtggggacagccctcactcctctaactgccagttctggcacctgagacaggacagtgactatctgggaagttgggagaggagcatcttcaccccccggatggggagccttggggtccaggctggggattagggagggggagcatgtgagtcctgtctgtgccccatctcaggctgtggtccagccaactctgccttgtagggattccagccagactggggagctcttaggggaaggacccagtactggagtacagtagatgttccataaatatcttctgggaccctaaagcatcaccatcagaagggactgttaaaatctcctagcccaagggtctcaaatttggtaaaatacaaacactgtttgacactgcctgagttctgtcccaggaatctgcttttcttttttgttatttttttattttggagacagtgtctcactctgtcacccaaattggagtgccgtggcaggatcacagctcactacagctttgacctcctgggcccaagcaatcctcccatctcagcttcctgagtagctgaggagccacaggcacatgccaccacacccagctaattttttaatttttgtggaggcagggtctccctatgttgcccaggctggtctttttttaattaattaattaattttttttgaaacggagtttcgctcttgttgcccaggctggagtgcaatggcgcaatcttggctcaccgcaacctccgcttcccaggttcaagcgattcacctgcctcagcctctcaagtagctgagattacagacatgtgcctccatgcccggctaattttgtatttttagtagagacgggatttctccatattggtcaggctggtcttgaactcctgacctcaggtgatcctcccgccttggcctcccaaagtgctgggattacaggcgtgagccaccacactcggcccagaatctgcttttcagttggtgcccccagtgatctctcttcagggtgtcaatcacggtccacagtttgaaaaatcttgccttggtccagtttctctccaggaaacagatagggctggtgagtcccagagagggaaagggacttgttcaaggtcacacagggagtgtgttattaaatttgggagggtggaagtggaataatgatatttcatcttatgctgtgtgtgctgccttgggttgtcagggcccataacaaatgtaccttgtttttttcctaagtaaatcaaccttggctcacgcctgtaatctcaacactttgggaggccgaggtgggaggatcgcttgagcccaggagttcaagaccagcctgagcaacagagaccttgtcgctacaaaaaataaaaataaccaacttaaagtgaatagtacaggcgtagcataagtgactgagataggatgaccttcaaagtgcttagcacagtgcctggattcaaaacggttggctaaccctcaattccgtttattatttttacaccttaatgcaaaaaccatgacagtggtattggaaacactatcatcttcgccagtgctcaaaatattttgatatgtcaaaaattcttttctccattttttggaaaacagatgcgagaaaggaaaggacttgcctaggtcacccagcaaggcaggtcatgaacaagagttgggtctgcgtctggcagacctaccacaggtgcggcctggagagatgaggcccacaaggcagcgacaggacctggattcagtgaggagaggggactcgcggggtagaagccaggaactgggaaggcgaggaggcgtgaaggcaccacctactgccaacccggctcgagctggtcactttgccctccatgagatcgtaggtgtgcttgttgttttattttacgggggaggaatggaaggctcagggaagttgaatgcggatgttgttcaagatcacacaggcctccagaggcggagccgggattggaacccaatctctaggactctgggttagcaaagcaaagggaggatgcagtggcgaggacagctagatacacctagggcgcagagcagccaggaccagagggccaatctgactatgcaggggtgagagggccacctcgggcagcttcctcggagcctcggttccccccttacagcgaggtgtcgctggggtgaactggtgggaactcccgcctcggtccacctcccgcacagagcatgcgtcgcgttccagctggaaccggtttggcgaggcggttcgaggggcggcgaccccacccccacccccccatgctcgggcatgcgcgtgccgacgtgggcgcgcgctcctttcctgggccggccggctgggcgtgggccggacgcggcggcccgcgcgcctgccgaccagcccggctgcgcgcgccgggccacatgccaagcgggctgcgcgcgcccctgcccggcccgggagtccctgacgacgcgcgcgcggctgacgcggggggcggggaggggcggggcaggtgcgggactttaacccggagccccgcccctcgggcgtacaaaaccggagcctcgggccgggctgcgtgagggaggagggtgagtgcccgccgctggccgccgccgccgccgccagtccgtccgtctgtccggtccacgtcgtcgctgccgcctcctcagcccggacgcccggggcccgcccagcgccgcccggagcagccgcggccccgcgaggagacgggggccgccccgcccggcccggcccggccctgccccgcccccgccctcgccctcctcctcctcctcctcctccccgtctgtccgtccgtccgtccgtccgcccgcccgcccgcccgcccgcgcttccgtcctgtccagccgccagtcctccagcccgtgtccccgctccgcccgctttgtctctccccggctcgctgtctctttgtctctgccctcgcgctcctccgcagcccctccctcgctccccatctcgggtccccttctcagagcgctcttcagccctcagagccgccctttctgggcgaccccactcttcgggactccccctcagagcgcccccagatcttttggggttccccttgagaacaccttccactctccccaagggctccccgtgagtttcttgcacatcctttgggggttctgcaccccaagtcgctggggtctcgcctcctctgaacccccattgcccctgggctttccctcttctgggtgttccccatatccactgggagctcctaggtcccaagttggggtctttctccttgggaccccccaatatgtcctcagctccctgacttcaggagctcctctctgctttcccctggtttgtcccctgtcgctgtctctccttgttctctctcaggtctccgagcacccccacttctcgggatcggggtcccctgctttgctctccctgcccctctgtgcccccacatctgtctcggtggtctcgccactctgtgcctcttgcgctgaaggcccccctttgagcctgcttctttgcctggggcccttggcccccccttgctttttcagccctagccccctgtctccccttctctctgctccttgtctccctctccctttttctgtctttgccgggtctctgggtctctgacccccatccggccctcatggctttgtgtctggagctcttgaagcaatgtgagtggtggggtgtccgggtcgggccggagttggcccgcaggctggccgcggccgaggctccatggggttggcgctggggcaagggctggcgctagggcaagggggctctgaggcctcccacaaagggggaaaggagggaggggccaggctgtctggcggaggagggagtggggggccttcctgctctgaggcttctgctttagttgcttgagtgtgtggagggcaccacgggctgggcatccctgcccacttggccccgcatggcctggcactttgtgatcgcttgtgggcaggccgggctattttggagccggcaggatgtgatatcatttggacgtttatttagccccggctgggtgtgggggctgcgttcttgccagcttgagtaatgaaattttgcaggggggtgggggtggggtcagcctcctaggcagctaggctgtggggttcatggccagaactttgcagaacaccagagtgggcaagtgaacaaaggtctgtgctgcctggatcttgctgagattcgattcaggatgagcagggagaggacttcttaatctgaccaccctgaggattgactttggtagtctaacctctggggccttggttctgccagcttcaaggtgttgtaaccttgagcgagacccttgtcctctctgtcagtttccctatctgtaaaaagtggataattgtgctggcctcacactgttgtcatgatgatcaaatgaaacatctgtagacacgctttgtgaactgtcagcctgtctttaaacagccccatcgagggagaggagcttgcccaagggtaaacagctggctggctcctgccagagctgggacagggatccaggactaggacattacagtccagggctctttaacctcctccccactacctggttattcgagaatgcacctgcccttccaatagagcagggagacggctgtttcttaattcaggccccaatcctgcttgttctttgttagtccgtttgtaaagatagatgggcgtgcccatcgggatgtctgtgcagggggacagttggattttccatgttccatcccattgttgtttaagggtgggccctgcttggacagtggcacttggaataaagtcactttgtagttgtgagccttggctgcttttcctgcttcccctgtagagtaggggaacaaagacctcagccgagagaggttctgcagagagctggggtttgctgtcaaggagcttaggatgtcctagaactttggtgcagggaatgagatcagctgttcaagcgccttgtcttacagatgaagagatgaggcccagaagggccagggacccacagaggtttgagccaggacttctgggtcctgttccatggcactgcctttgaagaagtcactgtcatgctgttatcacctgcccctggtgtataatgacaatctctaacatcctttgacctttttactgtgtacgctgtgcttggtgctttacttcagctacttgcagtggaaaagaagaagggcttggtgcctggcctggaagtgaggggtgcaggatcccagttcccacatctcacccacttttagggatgtcactttcctttgggcttcagcttcctaatccataaaatgggaataacattccttatcctaagactgattctgaaatcatggaatccctcaagaattgtgtgagcagcggctcactcctgtaatcctagcactttgggaggccaaggcaggcaggtcgcttgagctcaggagttcaagaccagcttgggcaacaagacaaaaccctgttgctccaaaaaatacaaaaattagctgggtgtggtggcatgcgcttgtattcccagctacttggaggaggctgaggcaggaggacagcttgaatccagaaggtcaggaggtcgagactgcagtgagctgagatcatgccactgcactccagcctgggtaacaaaatgagaccctgtcgaccgggcgcgctggctcacgcctgtaatcccaacactttgggaggccgaggcgggcagatcactggaggtcaggggttcgacatcagcctggccaacatggtgaaaccccgtctctactgaaaatacaaaaattagctgggtgtggtggcacacgcctgtaatcccagctacttgggaggctgacgcaggagaatcatttgaacctgggaagcggaggttgcagtgagctgagattgcaccattgcactccagcatgggtgacaaaagcaaaactctgtctcaaaaaaaaaaaaagaagaaactgttccagagagtagaaactctgggtttcagaaccacaaacgcctggttttaatcagtctccatcattcactgcgtttgtaatcttgggcaaattatttctttgagcttcagttttcttatctggactcaagatctgtactacaggattatgatgaggattaaatgagattatgtatttttttttaaatctggtgcacagtaggcacttaataaatgtgaactttcccttcccaaaaacatctgggtgacttttctctttgtaggaactagacagcccagttccccccccatcccccccacccccgcatgccctgtggttggggtttagataactaggaaagcacctgtggctattctaatagtaataggagtgatcttctcatctctcccaggctgtgtgaggcattgtgtaatcagccaggctctttcccgaccattgttctccaccaacaggcctggaagtcggaagccagtggagttctccctgtttcacaggtgaatgaaaaatagggggcccagagagagacaaggacctgctcaggggcccacagccacagcagtgacaggcaaacttgtagcccaggcctcttctccacagcccgcagcgtttctccaggtttatggcttctgcctgatagcctacccctcaggccgccttccctgggtctgttcccatctgttctgggaggagggttttcttgacatttccccagtctctgagctcatcttgaatttaaaaggaggctatctggaggctgggtggggactgagtcaccacctcccgtggctttctcatcctgagcagcaaccagacacacccagagggccactgctggagacctgcagattgtaaatgccacacaggctttcttcccagaagctcagatgggctcttgcgggaaggctgtcatcgtggttctgtatgtatttcttccttcccctagccactttgagaagttgttgcctgtcctttcccgcttcagcctttattaatgctgtcctcttcccctatagtgccctctcttcccctagaggcccacactgtcaaatgccacctcccccaggaagtttgtccttgctggctctggagtcccagcaggactcctgaggatgcttacggcatgaccttggcaggtcacgccacctttctgtgcctcagttttctcatatataaaatttgggtttcttgtctttataaagctccatccctagacactctcatttggcaggtcttggggcaggaatcacatgcccctaggtttttaaaccagctctctagaggatgctggtgctgagagcctgtcggctgcaacctgggaaaagctgaactgagaggaccctggtttgcatgacagcctagcttgttgctgtgtgaccttggattagtcagctttctgtacctccgttttcctccctatcagattgggatggaaatgagaactcgtgtagtaacagcccctcaataaatggcagtcatcaccatcatcagctttgttttgtgtggggattggtggttttcagaagcaagtcacctttcccctacttggtcctggcagcaggcactgtcaagtcagactgggccagggtgcaggctgtggaattgaacacctgagcaggaatgaagtctagtccttacaggaatgtaatgaggttgatgaggtgtgtggtgtaaatctctctcgggttcccagatttcccagacctgactgtggctgcctttcctcactcaacctgtgctggaatcagctgtgttaacagacagacccacccattcttagaaaccaaggctaccttaaagagaaatacaagccacattctagagctaaaacatggctgttccacagcatggaggcaggcccagggacgggtagggatgcctaggatcccagagcaagactagagccacatctctgcctccctcccccgggctccctcgtctctgtacatcactggcctggagccctgaggtctggtttggccagtgaacagtttcctcatgggataggagcaagagaagtggtcccaagtggtcaaagcgagtctctcgctcttgctctctctctctctctctctgtctctctctctctctctctgtctctctcctctctctctctctctgtctctgtctctctctctctctctctcctctctctctctctctctctctctctctctctctctctctctctctcccccccccttctctcggccctgccttcctagccctgggccaggctctgagaggatggggattaatagacagacaaggcgtctctgccctgaggaacttatggtctgacaagaagacaagcctacaattatgagagactgtgtgacactctgtaattaagcgtctgctgaggaaaagcattgtctgagaaggaagaagtgagcatgagccagaggaaacaagagccctttgaggggagctggatttgcagaggcagagggtggtgccgacattccagggaggtgggtgcagagggcatggctggatgataagtgtgcatttagggaaacagcagtatgctagttttgctgaggcatcagggctctggctggaaaatctgggtggagccaggaggttgtaggcagtgttaaacagctgaaaagcagaggcactggggaggcatggaaggttttagagcagaggtagcacaactggaagactttccagaggatgaatcaggctgggtaaattggaatgaataaaaatcacaacagggaggaggctttgcaggcatccagatgacacaagagggtgaggtttgggtggggcccatgggagtgggaagagccaattggggtagcagaggatgctgtgctcccttaggaaagcttggccagcgctctgatgggccagaagggaaaatgttgggtgttgctggtttggggcaggaagtagcagtctgagcacatttcttgtacacctgctgtttgcctggctctgcgccaggggctccacaagggcgctcatgaaatctgtacaataagccagaggcagatggacttcccatccctgttttgcagataaggaaaaggtagctcaggcccaaggccaactgtctccaaaccgtgtctcttcccacagctcagctctgcttcttggaaagggaactcctgcttttagggtcccaaggggctgagccttctttccctttaattaggagcaagcacatttatcctaaaagcccacaaatcttgctttctaaggatcctgaaggtcagggtgccagtttagaattccttaaaggtggaagagtcagaggagctagggaccctcacacaagcagttttacacactggactgtgagaaggttccggagttgtgctgtgtatatgtccagtctgatagtaggcatgtccaccactgggtctgttggaattctcagccagcccccaccagagaggggcccagccaacgcaatcagtcacccacaaaggcgggaagggacttgtctccaaggtgccttgcacaggagagccaagtgacggaggctaggactcatttctcaggctgcagccaggaatccccagtgggcagagggaaagggaaggggactagtgcttacacagtggctaccatgggaggcagcagtggttggtcccagtgtacagccaggaaattgatggcttggccgaggcctcccagccaatcattctctctgtgtgcagcccacactcctctgaacacaaacttggtcatgaggcagagcaaccacatggcaggcacagcctccaggtgcccctcaccctgctggtcccttgcctccagcaaacacccagcatctgtatgccagtttgctttggcagatactctgagcccagtggtatgcagggtacaattgtaactgtaaccgtgttcgtcataccaaaatctggacaaaggttttgagagattttttgctcctttggaacagaggtggcctgagaaatgctatttggactttggaacagtggactagagtgacctatgctgtccctttccattgtagtaattcatttgatgaccatctggagccagttgctttctcgtaaatttgctcattctcccgtatattcattctttttgttttgtttcagcacgttggttctggatctttaatatttgtttagtttgttttgatttgcagagcactttcatacacattatctcagtagatctttatccaactttggaaagtattactattcttatcatccttgtttttcagaagaggaaactgaggttcactggtagaaagaggcttgaccaagctcactgtggctgagctacttattcaataaatatttattaagtgctgctctgtgcctggcagtgagctggccctggggaaacactgacagacagagctgccttaaagacttagtttctgacctcccagagtctgcagcagcagcacaccgagatctagccaggatccaccccaggctcctaacctgcatcctgggccctctccacttcaggtccctgtagtttgggcctgtggcttaggtctagactgttgcagcccgtgagcccttatcctggagcatcttggtataaagcaagccaaggcataagtctctgcaaaccgaacttcaaaagtaacaaaagaggctgggcatggtggctcacgcatgtaatcccagcactttgagaggctgaggcgggcggatcacctgaggtcaggagttcgagaccagcctggccaacatggcaaaacccaatctctactaaaaatacaaaaattagccgagcgtggtggaacatgcctgtaatcccagctactcaggaggctgaggcgggagaattgcttgaacccgggaggtggaggttgcagtgagccgagatcgcgccattgcactccagcctgggcaacagagcaagactctgtctcaaaaaaaaaaaaaaaaaagtaacaaaagaggtcttcaggaatggcttaattattaacagggtgaggaagggcatctcagcagaaggccatctgctccttctccctgggggaacgttgcccaagggctgctttacctaagatccttgtgtgaattttctgcagcctccaaatatttgattacactctgcacaggtgtggagctctatggccatgtgctgagctggggaccctccccacctcctttaatattaaatgagatgaaataaagtaaggtcctaggatagcaggtctgaaaaggactctggcccagccccttcctttcccatgagtaggaactaaatctcggaggaaagggacttgccaggatcccatactgagagaccttccttccccttcccctcccttatcagtttcacttaatttcccgtccttcctgtaggaaccctctcatcccagctgtacatggtcagcattcaaagccttcttcaaatccttcctatgcctcaaagtcaagttttcccacagtcttccctggcactctcctccacaccccagagccccacagtgtccaggcttcctcagtctactctcagaggctgactgcctgttctgcaaggctagaccagcagcccttgaggagacatttcaaaatctgtgtgcctgggtcctgcctcccctcccaacccagggagtctgatacctgagatctaggaagaggcatctctggatacgttttgctggaggttttttttgtgtgtaaaagttatatttttactgaaaaagcaatacatgtatgttggtttaaaaaaattcaaacttggttaaaaaaaaaaaaaaagcccaatgaaaaattagtccctgtcctacccagacacctaatcactgtgacgagtcttgaggtttccttatagaaatactcagcatcacgtgcagctattgtcagtaacatccctttttattacttagacagtggcatagtctctccctacttttctataccttgaatttttcatgtaagtctctgttgcaggttattcttggtgggcacatacaggttcatggccacctttgctcctgagcatgtggctttccattgacggatagaccaccagttgtttgtcctctactcaaggatgtttagcttgttctcaatcttgctgctgtaaacagtgctgcagtgaacaccctttcctgtgtgtctccatgcacgagtgcatgtgtagctgtcggagccatttctgcacacagaattactctttccaagagtctgtgcgcttaaaattttgtcatgtattttttaattgccttctttttcattctgaaaatgtatatattttaaaaggcaccccgccttcacccccagattcaaatttgtttcctccatgagctcctctcgtgctgcacctgcttagcaacggtgaagccagtgagctcattcaaatatttactgaccttgccgggcgcgatggctcatgcctgtaatcccagcattttgggagtccaaggcaggcagatcacaaagtcaggagttcgagacctctactcgacctggccaatatggtgaaaccccgtctctactaaaaatacaaaaattagccgggcgtggtggtgggtgtctgtagtcccagctactcaggaggctgaggcagaagaatcacttgaacctgggaggcggaggttgcagtgagccgagattgcacctctgcactccagcctgggtgacagagcaagactccatctcaaaaataaataaataaataaataaataaactgacctcctgaatcccagtgctggcttggctgctatactcttgcccttcactgaacctcagttttcctcatctgaatagttgggagactcattcctgcctttctcatgtccctggctatttggtaaaccagccagtaggaagacatcgtgaaatgtattaaagtggtcttagctagacagagtgggcatgccagggtcagcagagattctgaagtctagaccagttccctgggtgggccgttgtcagtcctagcagatggccaggtcagccctcaggctggaaattttagggcagctattggtaggtgtctcctcttgctgtgctgagatacggtcaagatcatacttaggcttttgttggaagaacatacaagacgagagaaaaaaaaagatcatacttaggggctcccggaatttgctctgccctaggttgctgagacctctagaacctgtgcaggctaaaggaactcagtcggtagatccgagagaggtggtcagggagaccaggagcatgtctacactgccagcagacttttgcctcctcccccaagccagcaggatggcccaaaaaggctcccccagcagatcatctttgcagctccttttttagctccagtggcagcagggatgaggaagggaaagttctatcatttttttctaatttaaaatgacatttaaaatcactagcctagtgggggccaggtgtggtggctcatgcctgttatcccagcactttgggaagccaagacgagtggatcacttgagctcaggagttaaagaccagtctgggcaacatagcgaaacgccgtctctataaaaaaatacaaaaattagctggatgtggtggtgcacacctgtattcttagctgcttgtggggctaaggcgaaaggatcacttgagcccaggaggtcaaggctgtagtgagctgtttgtgccactgcactctagcctgggtgacaaagcaaaaccctgtctcaaaaaaaaaaaaaaaaaaaaaatcactagcttagttcctccctcctattttatcaataggaaaactgcagcctggagaagttgaagatctcctcccaagtctcccagtgaacttgacaggtctcagctcacttctgcttggattagaagccaggcatttgactctcctagtccttaactctcaacatctttcccaaattgttctagtcgtaaagtttcactttggggttaaaaaccaaagtgaaagaaaaatggcaaagcaggaagcagccacttcagacccagcccaggctgaggggacactctgagggacccaggcccaggtggcctcatgaggaggggagcaggccttttccctacccactcccacccttgctctgggagcctggctggggtagggactgggtggggccccgcagggagaggcgccaggctacagacaggcagtggcgtcctggcctggcccactgctgtctgggagacagccagtaggatgggttctctggtgaagtcagccccatgtgggtgtggtcccagccgggctccaggtaggccttttaaactcccatccttccggggcagagctgagctggagctgggcttctgtcagcttgggaaagaaatcctggcttcccaaacccagctttcacagagcatttcactttccctgaaggtaagagccagtgccctgtctttaccatgaaaactcttaaacttttggtcactgtgggcacttacttacctcctatagtttctttttgggacccagatgtcctgaaagccaaaggatggaggagctggaactgctggcttctcaccattttatgtcgctgagttgttgggtggcctcaggcaagacccttcccttctctggcctgcagattcctcatttgtttgtcagcaggagggagctccttctatctctgctattaagttgaatttggttcctggaagctggtgagagagtatcgtaacacccagtttggttggcctgtgtctttcagatattaactgttacctgattagctggggtctcaagttcctatttcctgtgcttttactaaggaaattctcagacttatcaatgcaaatatggtatcaattttgttgctagaccaaatatgattttttaaaatagagatttcccactatgctacccacgttggtctcaaactcctgggcccaagcagtctgcccgccttggcctcccaaagtgctgggattacaggtgtgagctaccatgcctggccagcaaatacgatttttatgtacctctcttctcctttgcacagtcacagggtccctaagtacagagctggagtccagtccctaagggcacctactgagcatacagtaggtgatcaggaagcccacaccccagaggtcatatgtacctatagttaagagcatctctgtagagttggactgctggggttcagttcctgggctgccagctagagctgtgagaccttggacaaggtacttaacctctctgggcttgtttcttcacctgcaaaatagagatgctaataatacctgactgtagtccagcatgaggacaacagaaacttgtgcaaagcactaagcacagtgcctggtacagaggaagcatttgagaagtattagctgctgctgttactgacatccagggggaaagagaagacttgaaatagccaaaaactgtccatgtcccatgcctggaaagatgtagatggattgggtgggctgtttggagtggagtcagttatttgatggctgtttgccaagtgcagggctcttatggggaaaggtggcctgggttaggggagaggcgaatgctctgcgtgagggaaggggaagaagggcagactgtccagggttcaggaaacccaagatcaggctggagaatctatccagggctgtcagaatctgccaggtatgtggagctagagttctctctgcagggtcatcactccatctgggcagtttcctactgggggctgtgacgaggacctattattgactgcggagaataggttggatagttctagcctctcctggaactttcttgccttccccctggcgtggctgttgccctgcacagggatgcagtaataggagttgtctgcctgcctgtggagtgcagaccaaggtggggtggggaagaggggcctgtctgacatcacccagtaaaggtagggctgccaccgttgctgctgtcccagcagtttctttaaaagaggcacatgcagcagtgtgtgggaagggtggggggtggagggcagggattgggctcctccctccttcctaccccacctccacttctctttccaaacaatcagccattcatttacttgagtgccaagtgctgtgccaggagccagggagagactagggaacaagattgacttccctccagcttggagtccccacccaagcaggtaacaaataaacaggatactgtctaatctgttagtgatgagaaccctaaaggaaacaagtagatgctgagaaattggggaaggcatctcagggaaagtgactgctggatgggaaggaggcagtcaagggccgactgggaggtgtcacgaccctgaggtgggggtatcttgagggaacaggagaggtaggggttacatctggagtagtctcaaggtcaggcaggaccctgggggtctcggtgaacctaaagaggtgtgataatgaatgtactgcaagtgaatatgtttatatgtttcttcctttttttttgagatggagtcccgctctgtcacccaggctggaatgtagtgacatgatcttgactcactgtagcctcgcctgccgggttcaagtgattcccctgcctcagcctcctgagtagctgggattacaggcgcctgccaccatgcctggctaatttttgtatttttagtagagatgggattttgccatgttgaccaggctggtctcgaactcctgaccttgtgatccgcccgcctcggcctcccaaagtgctgggattacaggcgtgagccaccaagcccggctctccatacaatctcttacccaattcctgtccaagattctatgatactaacacatccattactgcctttgtacacctctgatctttattttctgtttggattatttttcttttatttatatttgctgaatttcagtaaagagattgtaggcagattattaaccagcccttgctcacaaatacagttaactcaaatcagaaaatttttaaaaatgcttagttttaaatattttatttgtgacttttaggtttggaatgagtaaaatcaaagcagtttgataactgctggggctcattcttcagtgggccgctcactagtccatttttaacactgtcttaatgaccatcttaaccttttttttgtttgttttgagacagagtctcactctgtcgcccaggctggagtgcagtggcgcagtttcggctcactgcaaccttcgcctcccgggttcaagcaattctcgtgcctcagcctcccgagtagctggattgcaggcacgcgccaccacacctggttaatttttgtatttttagtagagacagggtttcaccatgttggccaggctggtctcaaactcctgagctcaggtgatccacctgccttggcctcccaaagtgctgggattacacacgcgcccggcccttcttaaccatttttaagtgtgcagttcattggcactaagtacattcccattgttgtatagccatcatcactatccgtctctttaactcttcatcttcccaaactgaaactccgtgcctattaaacactaactccccattacccccttgcctggtccctggcaaccaccttttttttttttttttttttttttttggagacacagtctcgctctgtctcccaggctggagtgcaatggcgctctcttggctcactgcaacctccacctcccaggttcaagcaattttcctccctctgcctcccgagtagctgggcttacaggcatctgccaccatgcccggctaattttttatatttttagtagaaacagggtttcaccatgttggtcaggctggtctcaaacttcagacctccggtgatccacccgcctcagcctcccaaagtgttgggattacaggcgtgagccaccgcacctggccagcaaccaccattctttctatgaattctattactctaggtatctcattcactagcccaattttttttttttttttggtttttttttttttttttttgagatggagtttcgttcttgttgcccaggctggagtgcaatggcacaatcttggctcaccgcaacctccgcctcccaggttcaagcaatctcccaagtagctgggattacaggcatgcaccaccatacccggctaattttgtgtttttaatagagactgggtttctccattttagtcggggtgatctcaaactcctgacctcaggtgatccgcctgcctcagcctcccaaagtgctgggattacaggcgtgagctaccatgcccagccctctctggcccattttaaggagatatatttgaagggcagctgaggggaatgctctgaataattaactcttatggtagtgattaattctccaagtttgtttttttctcttttttcttttttttttttaagacagagtctctgtcacccagcttggagtgcagtggcacaatttcggctccctgcaacctcgcctcctaggtccaagtgattctcctgcctcagcctcccaggtagctgggattacaggcacccgccaccacgcccggctaatttttgcattttcagtagagaggggtttcaccatgttggccaggctggttttgaactcctgacctcaagtgatccacccgcctctgcctcccaaagtgctgggattacaggcatgagccaccatgcccaggcaattctccaagttaatgcacaatgcacatctaagcttatgtgtggccttatcctggcagaattgctaagggactgatcatctgggagagcctcctctgcagaggtagccttggttccaaagcccctggtggctttgaggagcctggccactgccccctatggaggcaggataatgggatgaggaaggctgtggatctgatcacaggacccaagcataattccttcattagctacttgctctaggatttgggccaagtccctccacctgcctcagcctcagcttcctcttctgggaaatgggacaatactttccaacatatttatgactcagagtcagtgagacagatgatggacttcctttgcagttttgagaatcctagcacagtgtttggatgcagttaaatgcaaggaaaataggacgcctgatcccaatttgtagaagtagtggagacccagaaatacagggacttgcccaaggtcatacggcacttcactggtaaaattgggctgaaacccagctaccctccacaagttgcagctttttaaggtttcttgttggtcagtctttcgaaggacagtagacttgaaatagatgtttgcttttccgtcttactggatttgaaacatttctcaagaagctccagtgttgatgggcctgtgagggaggatagagggtaaagatttgggtagggaataaagacaataattctgtgtcataggactagagtcctaaatgactttcatggtgatcatcttgtccagggacagcaaatatcttgcactgggcaattacccctcctactggacccatggcagacagcatcagccacagcactcccattgacccctggatacagcgtgaggagtcttctcgacacaggcaaaaccaatcaaccagaagtagcatgcccagtggaatctgtgccctccctaatctagtgcagtcccctgcttttacagatgggtggcagtcctgggaggggaaaggactatgaagggcaattgatgtcacaggtctctttgtgagagcagaaaagagtctggcaggacagttcgaagccttcggaagtatgtttgcaaaaacatcagggcagagcagctcccagggggtagatgttatcaaggtaaagtctgttttctccagatgtttcttgggatgctgcctggcctcgggatgtttatgagagtgtactgtagtcagattccaccaaccagagcaggaggacaaacttggctatctacagcagcttctaagctttgtaggaatgtatgtgtcagtcttgccgaagcaagcttgtatttttactacttgtgaggctggatcctgtgaaggttgcattctggaagttgaaacctgtagggtttgtactcacttagcagatagaacatgactcactgtgtgatcccgaacagagccttcaacctctctgagcctcctttttccttagtagcacaggggtgatgatgaaaacatctccttgaggggatcaaatgtaagatgcagaggttaggacctcagatggtgattgggctactgcaataaccaccaattcctgagcaggtgaaaaacatctggcaactgtgattattagccactaatgttcagccactcctcagtgtggctgaccctgtgccattgttggggcagagttctatggacaggatggggtggttggtgaccttctgattggtagatgttctttcaaagacatcttcccagatgttaccatgttgtgctttcagaggtagttgagaggaacgttgagtggggcgggctctgtgggcatgaggggacatatagtcaagacttgttccagcatcactgtcatctgcttgccaagttgtctcttactcttctctacttagagtcttcaaagtcttctaggatgagggctctgccagcctgtgtcatttttagggtgaaatgagagggtggggttctgcctcctaagtgtcaacaggcattcacctgggtacctcttttgagccaggattggaggtcacagggatgccaccctgccttcaggaggctcagggtctaaaggaggaagcagaaaagtaaagaggtttgtaaaaatagtgtggtgggcaagggcctgtggtgtgcctgaatgtgggatgttgttcagtgagtgagccagggcaggggcctgggaagactgttagggaaggctttttggcaggagtgatgctggaactgatacctaaaggaggaggcagaatcagtgaggaagagggtgttcaggcagcacagaggcctggaagctgagcatggtgtgttggcatgaagggggtgatggagagttagaggggtgattgacaaggcagagaggccagtggtccctacactaaaatgttagaatggtgctgctacagtgcggtgtcgaggggctggatggttgggggtgctgggcagggcaatgaatcttcccgaacttagtccttggacaggatgagacccctcatttctgccccaggccagaaatcctcagcttctggcatgcagagtccatggagggcctgggattgggcagcagctccgtgggccctttgctcaggagatgtttaggctcctcaggcaattgtaatgacagttcctcacctgccaagccctttcccacctgtcttgggaaactcacagcagtcctagggcaatagacagggcaagccgcattattctcattttatagatgggagaaattcagacccaggagcttaagtcatacactgaatgaaggctgattccagggattcctaacctactggcagtttctgtcatagcaggtattttgaagggggcagggtagcaagtatcagctgatctcctattctgaggatggatttatcatctcagatgggagctcttatgcagctagacttcccagacgaaggtgttttacttccagactttgctgtctgaagccctggtgttagtcctcacaagatttcccgtgtggctaggctgtgtgaacattctcattttgtatttcgctgtttgttgataacaattctccggaggtaggggggtaaaaaagaccagtggctcacgcctgtaatcccagcacttggaagaccagggtgagatgatggcttgagcccaggagtttgagatcagtctgggcaacatagtgagaccctgtctctacaaaaaattaaaattaaaaaaattagtcaggagcagtggtacatgtctgtagtcctagctactcgggaggctgacgtgggaggatcacttgagcccaggaagttgaagctacagtgaactatgatcacaccctgtactccagcctaggtgacagagtgaaaccctgtctctaaacaaaaagttggctgggcacggtaactcaacgcctgtaatcccagcacttcaggaggcctaggtggaaaaattgcttaagcccaggagttctagtacagcatgggcaacatagtgagacctcatctctacaaaaactaaaaaaattagccaggcatggtggtgcacccctgtggttccagttacttgggaggctgaggtgagaggattgcttgagcccgggctatcaaggctgcagtgagctgtgatcataccactgcactccagcctggatgacagtgagactgtctcaaaaaaaaaatgttgaactatgaatgtcatgcacacaaagatgatgtgtggtatcacgtccagaactggatgtaaagtagaagggcaaagagcgtctcaggcccggtaggaatcttaaaagtcacacccatggggacttcagtttcctccctggcatccatcctgcctgtgtctagcctggctggccattttctaggtccttcttccatctttggccagctctgcttcttagaaagctcctctttataattagtcaaaatttacttccattaacaatccccaccttccttttcccctctgattgtagtgtgaccctctggggctacatgtgtatttgacagtcttttaggtatttgaggacagtagccatgcccttttaaattgtctctcttctccagggtgaccatcctagcctctccaagccatccctcactttacgctaagcacaacttttggtgcatatgtgtcacacgccccgtttgtgacaagtccgtcccagacacactaatcacttgttgaatcagtcctgggctttctcatgcaactccatatggctgccacagtgcccagtcagtggaggaggcttttcattgtcatctccacatttctatgggtttcttgaggacaaggactactcattctgggtccctagtggctggcactgtgcatggctttccctctgtaaataagcatttgctggaatggggtggagttgagacttctccctgtgtggatcaccttctgtcttcaggttccagtttgacgatatcccttgcctggaattacctatgataccctcagtattatccagagttcagtggggactgcgccctctctggtcctgtgactttcctgtaacagtgcatcctcagtgtctgtggtcagctgacgtcactaagccatttttccacatatgccgcttttcttgtgtaattgtcttacttgggttcccaaactcagggtcttaatataagctctgagggaaaaaaaatccctctgtttttctgtgtctctgtcccccgggtgtgcctggcacagagacaggcagcattacctctgctgacctgaagtgaactcacggttttccccattcagtcctgcactattcgtctcatcccaactctaggctgccgagggatcttggctcctactcctgtcacctgatatgccacctgccactccaggcccagtgaatgagcttgttaacactgcctttctattctgggattcgcttggtcattcagaatggtgaaagaggccagcaatcgaggtgcacagggcctggcagcgtctggctttgcacactggacacacagcctatgacagttggtgaaagccgggcttttgtgacctatcgccagggtttgaagtcagccctccattgacatcagccctccagaagtgagggtagtttttttgaggctctttccaagtaatacttcccaggctgggctctgggatcttagggctttggaaaggtagcagcaaagctcgtatgatacagccagtatttgaaaagccacattttgcattctctaccctcagtccttcaccagaccaagcgggctgcacatgtcaagtttttgcactgggctggagccgaggcagctttgtaactgggcggtttctcctgcttactagcacctgcttctcgtgggttgtttttttgtttttgtttttgtttttttgagacagggtctaactctgttgtccaggctggagtgcagtggcatgatcttggttcactacaacctctgtctcccgggttcaagtgatccccacacctcagcctcctgagtagctgggattactggcatgagataccatgcccggctaatttttgtatttttagtagagacagggtttcaccatgttggccaggctggtctcaaactcctgacctcaagtgatccccctgcctcagcctcccaaatcgctgagattacaggcatgagccaccatgcccggccaaatggttatagctttgataaacaacaagatcgtgatttagtaacagtagcttgggcgctaccatctctttaaagcttggattcctagggatgatggtaataaggtgtccagggtgggctggggcagggaccactgagcagagctcttggcagagcagactctgcaggtgggtctctgaggataaataaaatgatgtttgtggcagattccaatacataatgggtgaggagtggatggttcctgacaggctgcttactggatatggctgcagtggtagtagaaatggtttttcagaaactacatgctatttggacatactatttggaggtcagtggtcaggggctagaggaggcagagctcagctacgggaggatgcctccctgaatgcccggaactggtgttctccaggctggggggaaaccaggaacattcccacactcatagccccaggcaagggtccctgctctgctgccagatcctcagctcatgcatttgccttcctggtccttttttatgtgtactatgagagagtgaattagtctggtaggtctcagaataacatgtgggaattctgtacagagaaaaaaggggaaatggggctgttctgagggacctggggtggggtgagagtccaaagagccttcctcaggcccccttgggaatccccagaaccagactcagccacgctggagaagtcctaagtggctgggaacccatgtgagtggttccggtgttcctggtgagagagtcagagcatgtggggccatgtgtctggaagcaggacctgaaggaggacagtggacaggcagcatgggcaccttagccatgtgctggggttctgcaccagcggtcaccaggcccctgtcctcatggtcagcagagccagagctgccaccctctaacccactcaggaaatagtcaaaccctgcctgaagaccccaggaataaagggcccatttaggcccttttaggccctgactggggaactggcctggccaggatctcagccaggctctggcaggtggcacctaactcccagccctggaggccgtggctaaagagcagctaaatgcactggctctgggaggaaagcctgggctcaaattctggcttttccacttcctgtctgtgtaatcctgggctactcacttctctgagcctcaggggttttttgtttgtttattttttctccttgaaatcagaatggtaggcctggtgaagagttggtgagccgatatagttaaagtgcttcatgctaggccagttcatgtccagccctctgtcagtgggagatgtcatggacagccagcagacagcttcccacccactgaggacctgccgccctggactgtgggtgtgcctagaagcatcgcttaacctcttctctgactcctgtgaccccaacatgtcaggaaaaaagcccctcatacccttgaccccaactggggagtgagcagctctcctaaggagcagctggggtggggtggaggcattgctctggcaactgagcaggtccctctcaggcctctgctccaggcccctgaaggagggtggctgtctgcactgtggatacagctctcctgccacctgtgtcctggtgccaagagcctgaaaccagacctggccttccggccaaaagggactttctctgctttcacccagccggaactgagacaccactagaagttcctcctggctgcctccacctcaaggttcccaccaggctcctgcctttccgagaggaggctctgatggacagtcttcctggggagcaagggagggggctggagccctagaaggaacaaggaggtctggggcagctgctgcggcagtgatagactcgtgtgccatgggccactgccgctgcacgtgcacctgcattgtatttcttaaaattataaattaacaccatttgaaaattcagaggagtttttttgccaattgattttttttccactgactgttcctcaaatgattcttctattgatatataatagatatacatattttcagggtagatgtgatattttaatatatccatataatatgtaatgatcaaataagagtaattaggatatccatcaccttaaacatttttctatgtgctgggaatattcaaattattttctttggccgggcgaggtggctcgcgccagtaatcccagcacttttggaggccaagtccagagggttgcttgagcccaggagtttgagaccagcttgggcaacaaagaccccatctctacaaaaaattaaaaatgagccaggcatgatggagcatgcctgtggccccagctacttgggagactgaggtgggaggatcatttgagcccagaggtcaaggctgcagtgagccatgacagagtgagaccctgtcccaaaaaaaaaaaaaaaaaactgctagctaatttgaaatgtatattttaaaatccagatttctggtacatttggcagctctgacaacgctgggcccaggtttccaacatggcagctgtgagccagaaagggttgatgccctgtgcacatttgaactgtgacccccgttcagggacaacccacttagtttacagctgtggaaactaaggcccagaagggactcaggccctgtgcagagtacacagcccaccatggccagcattgattttagatcctggcagcctggccttgcagagcagagctttctgcgctgccactcataagagtaaaaagcctcttctcccatctgtaaagtatcagtgataattaccactcctcccagagctgtgtcaggataaagtagcacctggcccaggcctccgtaatgattcttttaaatctgtacaaatgctacaccttgcctggaaagtgttgctggaagcaccacatgctttctctgccacttttcagaaatgattatttttcacacactttccattgctccgtgccgagggtttgttgcactctcattcccacagcttcattgcccagcttcaagcagatttgctcaaggctctacctcccaccagactgtgctcctgtgtgtggtggggcgtgatctgaagggagttcaaagccctggccctggggattagatccaaactaaaagaccaggaataaatcattctgcttccatgtgcctctgtttacccagttgtcaaataggggtttgttcattcgttcagtaaatatttactgagcccaaccatgtattgagcctggtactgagaaagcaccatgattatataagatactcaaggtccccaccatcagggacctgtatcagatactcaggttccctatctggtagaggagagagaccaaagacatgtgagctaataaatgaccagtgcttgaatgaaacaagcagagtccttaaagaataatagctttagactggatggtcagggaggccctcactgaagacatgctacttgagctggacctaaaatcatgatgagaaggagcagacatgccaacatgagggtgaagttagtttcagacagggcatggcaggtccaaaggccccacgtgggaacatgcttggagcatttgaggaatagcaaaaggctggtgtggctggaatggaattagggaggggagggtgggccagttcctattgtaggctaaggtaagcaatgtggattttattctgtatggaatggggagccttttttttgagatgaaattttgcttcagttgcacaggctggagtgtagtggcgcaatctcggctcactgcaacctccacctcccaggttcaagtgattctcctgtttcagccccctgagtagctgggattacaggcctgcgccaccacacccggccaattttttgtatttttagtagaggcggggtttcaccatgttggccaggctggtctcaaactcctgacctcaggtgatccgcccgcgtcagcctcccatagtgctgagataacaggtgtgagccacctcacccggcctggaatggggagcctttgaaaagcttcagaaaaggggagaagcaatccagtttgagcttttaaaaactgtcagggttccaagagtgattgtgggtaagatgggccatagagaaaacagggacgcaaaagaccaggcctgctggggtggagagacgctggtctctgttagctgtgcttttgcggtagagaggtgaggctctgcagatggaggagggtggaaggaggagatgggaatttccatgcttctggagtgtataactgagtgttcagggccccctctctgggagagcaaggctgatgtgaaggaggagaggattcagattcattctggacacactcaacttgaatggccttggcactccctggcacagctgcctagtgcactgggactcttgagatagtaggtgatactccctcctaactgctttcagtgcctgtgcactgtaaaattatctgcccatgggccagtctggagggacttcatgagaaatgggatgctatgggcaggaagaaggtgcctctgttcccattgctgcttagagcagccccaggaagctgaggatcctgagaggaggcagccttccttggatctcctttcctcaatccctatcctccctccacgagctaaggtacctaagttacattttgccaaactgtgccccactcagcatctgtcctcccatgccttggactgtcccgccctgctcctttgctcacagagggtcccttcaccagaaagctctgtatttccttgccactaagcgactctcaccacccatctagacgcaggcaaccttagtgtcttccagaaaggcccccagattgcctcccagaaggcaatcactttctccttaatccagaaaccatggtaacaaaattggcatgggcccaccccaagatcaaaaaatacctcatgcctgtcagctccttggctcctacccggagcacattgagtatcacatcctatttttatgggtaaaacaactgccatgtaaaaggcagttagtgcgccgggcgtggtggctcatgcctgtaatcccagcactttgggaggctgaggcgggtggatcacgaggttgggagtttgagaccagcctggccaacatggtgaaaccccgtctctactaaaaatacaaaaattagccgggcatggtggcgcgcgcctataatcccagctactcaggaggctgaggcaggagaatcgcttgaacccgggaggcagaggttgcagtaagccaagattgctccactgcactccagcctgggcaacagagtgagactctgtctcaaaaaaaaaaaaaaaaaagcagttagtgcagcagaggggccatcgagtagtggtcagccttcaggcaccctggtttcaggccgcggcctcagcactgcctagctgggaggtgagtgcaggcaaatctccacctctctgtaacatggggcatttacatttgggaaataggaacctccttcatactggttttgaggattcagtcagctaaaggatagctaaagtagattctcattcactgtagttatgttcacagagtcatagtgaatgctaaaccattgctcttctgggcagtatagggtcactgcaagcctgtggtcataatgtttctaccaaccaaccaatcaatccataaccttgttttatgtgtgtctctgttgaaagatttttttttttttttgagacagggtctcttgttgcccaggctagagtgtgcagtggtgcaatcttggctcactgcaccctctgcctcccaggttcaagtgattctcccacctcagcctcccaaatagctgggactacaggcatccaccaccacacccagctaatttttgtattttcagtagagacggggttttgctatgttggccaggctggtctcctgacctcaagtgatctgcccgcctcagcctcccaaagtgctgggattacaggcgtgagccactgtgcccagctgaaagattctttacttaatatactattgattcattaacattgaactcatggccagcagcactatgactcatgcatggatgaagcgtacctaacacttttctccataagggacatcacagccttcttgcactgagaacactgggcagtgcttcagcattatgtaggtgccattttaaacagtgaagtcaccaacagaaagcccacaaatgggaaaagtatagcactaaatagacctgcgaaaggacacttgtttacagtatgagagctgcagtgagaaggtggagtgtcaccttgttccacctcagctggggttgtgtgtagcgggcacatgtctgcgagccccttaagtgttggttttgcaagtaaattcaagtgagtaggtgattttgcacatatagaattagtaagtaggatcagctgtatatgaagtacctgctcaggcctggccatggttagcactcagtaaggtcagctgttagcatcagaatcattaccgaagggagtgcatcatagcttctgtaccaggctccaaggacagagctagctccctgagctttatggctttgtcttcatcagcctgacacctttttaacttcttggcttctgtggatgtttgggtccgaggtagatgcagatccttgaggccctgaatgcccccactgaagggtttgtttgttccaagtctacaaaccattgaatggtttcaggttgtggtgccactgaatagtttcaaacagtgacatgattggattcctcaaatggctggggtggaagagggacaagaggtcggaaggccagggggcatctgtggtagtctcagggaggctggctccagatcacggggagaaggtaaggatgggaggggcctggctgtgaagggcagaggaggatccccagaaggacttgggaggatgctgccgtgagaggggctgccagtccctcttgctggagtttgaaagtaaagtttgatgttgctaattcttctttttttttttttttttttttttgatggagtcttgctctgtcacccaggctggagtgcagtggcgcaatcctggctcactgcaacctttgcctcccgggttcaagcaattctcttgcctcagcctccctagtagctggaattacaggtctacaccaccacacccggctattttttgtatttttagtagagatgggttaccctgtgttggccaggctggtctcgaactcctgacctcagatgatccacccacctcggcctctcaaaacgttggaattacaggtgtgagcctccgcgcccggccagtgttgctatttcttaaggcacagtgagggaggtggctctccgactgaaacagtgggaaaggagagggtcacatggactgtcaacagagaagtggctttgagaaggcaatgtgtccctgatcctgacctagctgcttggaattctcttcccagctgcttctgccttgggagaaagaagcagaggaaaggagggaaggatttgaggctgggtgggtgggagtctttgagctgtttttatcatagcatacagatgagttgcccaatttagctgtgtggtttgacaagttacttgctggctgggagagggagtgggatcttaaccagccctcagcccttccactaatgagccttttccctagcttggcagtaccagcaaagggagttaagggagtctgcctttctctggggtcagcttcatccattcatgggggccttgagcccggccccactgtctttgctgtaaagcctgagccatggcttccaggttgtctgtggccccagggcacctgttcctcttgaggagtgtagaccgcctctcctttgccccctcaggcacctgggagccagcaggcatgaggcccgtgttaggcctcaggaccaagttcagcctggcctccaagacacatgcagggggctagcttcttgaggttgctgtgtcctccgcatccctcgggaaatggagtcacagccactcctgagtatttgaagctctgtttggccagcttataacctttacaataaaaaacaaaatgcaggccgggcacggtggctcacgcctgtaatcccagcactttgggaggccaaggtgggcggatcacgaggtcaagagttcaagaccagcctgaccaacatggtgaaaccccatctctactaaaaaaaaaaaaaaaaaaaaatacaaaaattagccaggcatggtggtgcatgcctgtaatcccagctactcaggaggctgaggcctgggaagtggaggatgcagtgagccaagatcgcaccactgcactccagcctgggcgacagaacaagactctgtctcaaaaaaaaaaaaaatgcagaaacaaattcattctgacctgataaatacagtttggaggataaaatcttggggtagaagacagaaataatgagataaaggaagcttctctagaagaagcaaggacttaggtgctgcgaggtagggaggctgggctagatacctggggctgggagcaggctgcacggaggatgcatcgcacaactggcttgtgtctgggctgtggcatgagggacctgcatggctgagagggggtcaggagaagcaagcatgcagcccatggggatgggtggtttcacgtgctgtggtttaggggctggcaggaagcatggagaacaggggaagggggctccagcagaaacccatgcatgtgtaaaggcttggatgcacggaggtgtgccgtgtttgggaatggtgcactgtgcatttggttctctgaagctggaaggggtatgctgagggggtgggaggggcatgagatgaagctgctgagatggatgggcagggaccaagcaaaaagggctcaggtttgggaggagccctagaaccttggatactaaagtgttgggagcctttgctatatggccaaataatctgggtttttggcaactgagggtttttgtagtgataatgaggtttattttctctttcaacaaattattgagagcctttgtgcttgaggcataaccccaatcctggcatgtggcatgatttgtcaggacagagttccctcaattgccccaggcctgtagctgtcagttgactcctccaagcccgtggactgatgtggtcagtgctctgatggagattcccaggtggaagaagagacggcagtcgggaggctctcagaggaagaaattctgaaacttgtgggtagctgagggaagccttccaggcagaagaacagtatgtgtgaaggccccagcgggggaggaagtggccggggtgaggtattggaagaggtgggggtgaggtatttcctcactatatttcctgcattcacacatttgaaatgagagctctcctgtacaaggttaggtcccatctccctgcttcagggaggcaatactcagagctgaggggtgcctgtcccccagggagcccctgaagccccaaaatcttgtatgctagacaacaccacttatctggctgtggcctgtgtgtgcctcaggagacagaggatccaagatcagctcactttcctcttaccgaatcaggcctggacttgctttctggctgggttactttccctctgatgactggctgcctaggccagggctcagggcgtctgagggtgcttagtagaactctgggcccagcagctctgagagagaggctggagggtcagtcctttgtccagaccctgactgtgggcagtcctgttgtcttccattgggaagaaggtgtgcctcttcccaccagaacctcgtgaatgctgcatgcacactcttcatggacagtgtcatccctaccccacagatgggaacaaggactctggtgtcacacagcctaagctaggcttagtgcccagttcttgctcccccatactaactgctaccctcctaagggagatatactcccttaaacattttgagcaaattgaggttggcttccgttttctgatctagggcaaaaaaccccatttgtttgggactttaggtcaaacaaatccattcctttcctgaaatcctcagtgagttagtcctgtctctgctggtggccatagatttcaagagttgctctaaacaaacgtccaggtcttggtggaaactgtccctgggccagtcagagaaccagcccagactccctgccagtggctggggagtggtagaaatttggctcgcccccccatccccaccctacccacaggcccagttgtgtctgtaccagaaatgaggagtgatgccaagcctaggcctggcccagccttagcttctgcaatgcaacctatgtaatcacacccattttacaaggaggaaactggggccatacaacaggtcagtgacaagagctgggacctgaactcaggctagtctggttccacactgccccctggcttctggacccttaccaccaaaatgactctgaaactagagaatttcaggatttcagacatcagtggagagggcattcgcagaggggatcttccctgcagtcacagtgatgggaggctccacacccatccttgagggagaagatgaatggggcagtgctttgagtttgtcaggggctgtgtgaatgcagtatgctgtgacccagtgagaatccctcccgcccttccggaacagaggagagttctgagaagcccagagggcaagcaggagcctggaagccaggcctctgcctccgtcgaggccctttctactcccacagtcagattttggtttgttgtgcccctgcagactggtcccagggcccagcaggatgctgtagggatgtggtgatgagtgaaggccccaaacaccggcagcccagcccagcccagcccagcgaggaggggcccaaggcctggagagcagagtgaggtggctgtgccgtggagcagatgcggctgctgcttactcctgcaactttgagcaagttgtataaccttcctgagcttcacgtgccccacctgcaaagtgggcatagtcacgatctccacctcacaggctctgaggcttacgttagaaagccgcaaagctgctgagcacagcttagtaaatgacccagcttttggcccgcagcctgtgccttgtggccagctgaacgcagttgctcctcttcgctgagcaggcgtgtccctcctctctcaggatgatgtgttggagagccattcttcttttgacctgagccctgcctcctgcctccctgctgcctttcttctggcccagagaggtagctgtccttctgcctgtacactgctcttaggttggtaaccagagatgcaggtgtctgtctgggggatctctgagttttctcaaggcctgagcaggactgggacatttcaaacagacgagtaggaagtgagtgctcctggcttggaactcagagcactttgtggcctctggactaggctgggcacaaggcacagcatccagttccctgggcttaacatcgtggcatgtgttactttcaaagaactcactgcagagctgtttctctgctgatgagggctcctggcttttctggaatccactagaaggccttggtttcatagatgtctattggatgaacagatggattattttaaattaaattttatttttagataattgtagattcacatgcagttgtaaaaaataatacaaagggattcttcataccccttactcgatttccctcaatagtaagaccttgcaaaactaatacattctcacatccagaatatcgacagatacaatccacccatcttattcagatttccccagttccacttgtgtgtgtgttagtgctatgcagttttatcacatgcatacattcatgtaaccatccccacactcaatacaggactattccatcacttcatacaagggtccctcttgttacctttttatagccacacctacttccctccttgccctccccttcaccctctccctagtgaccacctctgccctagcaactactaatctgttctctaggtcatttcaagaatgttataggccaggcacagtggctcacacctataatcccagcattttgggagactgaggcaggaggatcccttgagtccaggagttcgagactaacctggcaacatagtgagacctcatctctaccaaaagtaaaaaagtggttttttttttttgttcggtttttttttttttttttttttttttgagacggaatttcgctcttattgcctaggctggagtgcagtggcgtaatcttggctcactgcaacctccgcctcccaagtttaagcaattctcctgcctcagcctcctgatagctaggattacaggcgtgtaccaccatgcccagctgcatgttttatttttataagaaaatgccaatgtattttccatgacagtagtatcactttttctccacattctcaatagcatttgatgttgtcactttttagccattctgataggttatgtgatggtatctcatagtggcagatggatggtttctacagtcctttgtccacagctcctgtgatactgggccttgttttgtgagttgcctctgggctatcaccatcaccatgattgtagccccttgaaggcacagtttatctggctcatgggcccagaccagggtaggggcttgtttcagtcctcacagggcaacaggcagttggagttaaggtgctgagaaaggcactagatccaacgtcaccctcccagcaaacagctactgttggaaaagcactttctattgccaacagagttctcatcgtctgagaagcaagcagtgggcctttggtgttctgggctcctgctgtgggtcagcccctggctggggtcagggtgagattcagagatggttcaggttcctacccatggcaggtcctggctctgggaatctcagtggagaaagtggagaacagggagttggaccagtggagaacagggaggcagaccactgtacgggtttcacataacgagaaagtgttggggtgggaatggcaagatagggaaaggggttagctggaccctgaaggatgtgtgtttttttgtttgttcatgtgtttgtttgtttgtttgttttgagatggagttttgcttttgttccccaggctggagtgcaatggtgcaacctcggctcactgcaacctccacctcccaggttcaagcagttctcctgcctcagccttccgagtagctgggattacaggcatgcgccaccacgcccagctaattttgtatttttagtagagatgaggtttctccatgttggtcaggctggtctcgaactcctgacctcaggtgatctgcccacttcagcctcccaaaatgctgggactacaggcgtgagccactgcgcccggccagatgtgttcatttttgaccaggtggagagggggcatccaagcagagggaataggggagagggaaggtggtgtggaaggaaaagaccagggggagcactgagtctctcagtgaccttgaagatagcaaggttaaccattccttagctgttttggcatctgctctgttgtcaccacctccccacggcacgggtcagggtctgtcacagcctcgtggccccacgcacttcacctagtacatgcccctgctggataataaggtttgtgtgtgactgatgtgggggatatctttggccagtggtggcatcccctcaagactttgtctcgaatgagggtgggtagggcctgtgtgtgtctgtcttggtcattgcagtcttgaccctcgttctccctgctccagaaatccttgcggacggaatggctaagcccagagctagggccaagtcaggcagggcttctgcattggaaggggcttgagagggttgggggcttcaccatctcacctctcccctgcccttctctcatccatctgcaggttcatcatgcctagtggcgtataagaagaccccgccaccggtccctccacgcaccacttcaaagccgttcatctcagtcacagtccagagcagtactgagtctgcccaggacacctacctggacagccaggaccacaagagcgaggtgactagccagtcgggcctgagcaactcgtcggacagcctggacagcagtacccgaccgcccagcgtgacacggggtggagtcgccccagcccctgaggccccagagccacccccaaaacatgcagctctgaaaagtgaacaagggacgctgaccagctctgagtcccaccccgaggccgcccccaaaaggaaactgtcatcgataggaatacaagtaggggctccttttgcactctgtgtcctcagcccactccgtgcacctgcctgtgtgtaattacatctggtagaggcccactaggtctcctgggaaaaggtggtttgtctctctattttgggggatcagccccaagtggccaaaccgaattccacccatagccacgcctcgctggtatctgtccacacgtgctgctggtcagcagctgtgggcatgtgtttctgctcctccagtgggttgtcccagtgaatgtagttacactcagccagccatctcctgtccactgtttgcctgtccactgtctgtctgtccactccaccctttgccctgccagctgacccgtgggaggcgggactggcctaacagttctctaatccaaggtcagctcgggtgcggaggccatagccccgcttggcggcaggagcagcatggagcatagacgctgttgggccaggggcccaggacccagggcccttgagccatgggggttgctcgaggggaactttgcccagagccctctcgggccttggggacaggtaggtggcttgaggtaccaggcccatgtcattgagaagggtgatgccggtctcactgcctccctccatgggatagggtccaggcgatggttccccagggttaggtggccaaagtcagcaggccctccatagtcatggcacacagcagggcaggtgtgccagcttcccctccactgcttcattgcactcctgcatgcacccgatgtcaataatctgtcttgtttgctgagctggggaaacttgggccctgccttgtagtttttaagagtttctctaaatccagattgagtggactctccctgccctggctggacctgcagaccaaactagggcacgttcagagccatgagggaggggcagctacagtgggtgagggcgagaggggagacagggcccccccaagcccaggggttgagtcagggaggacgaggcattgtgtgttgtggcacaggctgcaagggactcctccagccacccctgagcaattggatgtggcccagctgataacaaagcactggaatgcaggagcgtgggacacaaagtggagcttgaatggaacagagaaggctcactgagcaatttcttgcagttgcctgtatttgtttcctccaagaggcagctctaggcttccacttccccatgtataaacagagagagagttggccaggagactctgctgctgttttctgggcttcttaagtgtccagtccctgcgctgcacaggtgggattctcagaaacacagagagtagcctgatcttcaacccttggtcctgaccacccatatctttgggcagccccaccctcttgctggccaaaccagacgctcttatcttcccggaaagcctaagagttaggactacccttgattcctttcacccagaaaatgacaccgggataaggactctcttaggcctgtcctgggcgtcccattccctggattcaccccagccccattcttggtctcattgcagctccttggagatccagtggtgctgcattccttgagccggcttttgccgaggggaaatgtggctgcatccctgtcccagaaagcttccctggcccctacttctctccacaaggccaagagactgaagagtccccagtttctgaggatgccctgaacccttggtgcctcatgccctagattgagtgtgggtttctccctcattcttgagtgatgataggaaagctggcctggctgccccatggcccgggacctttgtcccagagaagaaaggcaggcgcagggcatcactgttgtcctgttccacttcacaggagtggagggagtgacagctttccacttggccctgaccccagtccttcctactgctccccagggccacccagtgctaaaggtaacctcagccaagtgtgaataacgtccagggacttcggtggctcctgtgggtggcagtttctgaatctagaactgccgtccagggtttgcccttagtgcaggcgcctctggcctgccctccaggtttctgccacagggttcagggagtgatctttgcctcaagacagccgccagcttcaactacaccagataacggctgtggctttgtgtgtgtgtgtgtgttttctttctctttcgtcgtccttttttttttttctctctgatgcgtgtgaaggagaggactagaaggaacggttcccacctctcggaggacaacggacccaaagcgatcgatgtgatggcaccctcctcagagtagggaaagccagtcatctccaccccatcccacctcccgcccacctgcccgcccgcccgcctgcccgcctccacgcgaatgagcagtgcccggcttaacctggtccggcctcgggcccacgtgcagtgtccgcatgcctcgtgtctgtctgtccacacgtccgtttgcgtcgtcccactaatgtgaatttcagcagcaagtgtggtgtttgttttttatttttgtctttgtctccgtgccgttgctgtcgttgtccttcaataaggttgactgcattcagccagtgccaaaagaggagcccagtcccgctaccaaattccagtccatcggggttcaggtagaggacgactggcggtaagtcggacagaggtggcggctgcttctcccctctcctctccctccctccgctctcacctctcctgctctccctaacccacttctccttgctggatttctaataaccaagctgggtttgggttgcgggtggtggcccaggcatgggaggctgggcaggggcgggcgggtggacagatgagcatttgctctgtgagaccagtcacccacgggggccatggctgggccaggacatggcgtcagctgccctgatgctggtggtcttcctggccccactgcagtaaacaggcaaccttatgaccttgtcctcgtgtgtgtgtgcgtgtgggcttgggcgggatggggcaagggctgagccaagaatgagatgggggctgtgggacccgcttcaggcgcatggtgagcagatgatgcatccgtttctctgtctcccgtgtgtccgggtcaaggcggcctctggtctctggccctcttggtgactcactccttcctgtccccaccccatccaccccctacccacagaagcagcgtcccctctcacagtatgtcctcccgacgggacacagactcggatacccaggatgccaatgactcaagctgtaagtcatctgagaggagcctcccggactgtacccctcaccccaactccatcagcatcgatgccggtccccggcaggcccccaagattgcccagatcaagcgcaacctctcctatggagacaacagcgaccctgccctagaggcgtcctcgctgcccccacccgacccctggctcgagacctcctccagctccccagcagagccggcacagccaggggcctgccgccgagacggctactggttcctaaagctactgcaggcagaaacagagcggctggaaggctggtgctgccagatggacaaggagaccaaagagaacaacctctctgaagaaggtgggtgccacatggatggtccttgggcaagggtagaaggtgttggcagctggtttcagctggtggccagcagcttccgaacttctgagtgggggtctcttaggttctcttcttgggctagtttttgagctcccttcttactttcttcgcattcttccatccatccacctatttaaccaaacctctttccagaaagggttgctggtgatagctgtttgttgtgcaggctgtgaggccacccacacctgggtttgaatcccagctcctcccttactagtgaagtaaccttggtcaggttactccgagcccccatttcctcatctgtaaaatggagctaatcctctgctcactatatgagcatgttgtaaggattgaatgtggtcgtgcatgtgaagggcctgatgacctgtcagacacagagaaaagtgggagcctaattatgccttcaacaacttttttttttttttttttgagacggagtcttgctccatcacccaggctggagtgcagtggctcgatatcagctcactgtaaacctctgcctcccaagttcaagcaattctcctgcctcagcctcctgagtagctgggactacaggcacgtgccaccacacctggctgatttttgtatttttagtagagacggggtttcaccatgttggccaggctggtctcgaactcctgacctcaggtgatccacctgcctctgcctcccagagtgctgggattacaggcgtgagccaccacactcagccaacagcttcttactgagtgcttcctgtgtgccaagcaccagggatccaactgggtctcaatagggtgtgaagaagttatgcttttattttctacttaagtttctacctatatcatgccaatttccaaaaattcccttgagaaattagttcaagaaagtgctagacacgtgtagggagcctagattcacaggtggttggaggggggttgggtggtggaaggcaggtcctgggaagctccaggctgttgacctgcacccacctggttcacctgtggctctggttcccattgagctactcctccacactcaggaaggacaggtcttcagagtgtccaaatggtttgacacacatcccatacatgatggagggggccctgaggacagcagcctttgatgatgcagaagactcatcagagtcattgttttcactgtcctctaggccagttccccgctttgatgtcacacccactagtgcaggggaactgttgtgaggaaagtacctagtaactttttacaataatagtattttaaaaaatcaaaacagagacaaggatcagagagcattaaaaggcttctaagagaaaacatccagcccaccgccctacctgggcctttccccactttcagtttttactagctgtatattctggtatttgtcttcatatatcttttaaaaaatgtgactgattatatttcctctttaaaattaatcatcatttctattaatttcctgttaccattggcatagatgagtgtttagctctcacacaacctctgtctccctttctcccaccctctgtgtacatcacagtttatgataaatagtaatcagtgtttctgtttactatgagtatgtaaatattgtttattgcagagcctaacagtatattattattgcgttttcttctttttacattttgtttttcctaaaacgaattgtttgccctgttgccacatttaaaaaatacactccatttgctaaattttaaaaaaattttttaagagacatggcctcactctgtcatccaggttggaagtgcagtggcataagcatagctcactgcagcctcaaactcctgggccgaagtaatcctctcacctcagcttcctgagtagcaaaggactaccacagagtgccaccatgcccagctaatttttaaatttttttgtagggacaaggtctccctgcgttgcctaggctggtctcaaactcctgggctcaagccatcctcttgggttggcctcccaaagtgctgggattacagacgtgagccaccacacccggacaacaatttctatataaatataaaaatgaagttaaaaataattttccctcagaatcttaaaggcaccatcattttttttatttttatttttttgagacagtcttgctctgtcgcccaggctggagtgcagtggtgtgatctcagctcactgcaacctccacctcctgggttcaagtgattctcctgcctcagcctcccgagtagctgggattacaggtgtgtgccaccatgcccagctaattttttgtatttttagtagagatggggtttcactgtgttggccaggctggtctcaaactcctgacctcagataatccgcccggcttggcttcccagaatgctgagattacaggcatgagccaccatgcctggccaccttgtattaatttttaaaagtaattttctcacttctatttgttctgttgtctggctctagaatttctgtcagttagttgctgtacctgctgtgtggatcctcaggctctcaccttttcttcctcatgttttttgttggacttcctcgaaggttttctttttcttttctctttttcttctgccctgtgatggctttactgagatataattcacataccacaaaattcacccttttaaagtacacatttagtaaactcacaatggcacttagtgtattcacagtgtggtgcaaccatcactactgtttattttaagaacatgttcattgccccaaaaagatgctctctgctcattaggagccgctcccacagccttaggcaacctctaatctttctgtctctggatttgcctattctggacatttcatataaacagaatcataccatatatggccttttttttttttttttttttttttttgagacggagtctcgctctgtcttccaggctggagtgcagtggcgcgatcttggctcactgcaagctccgcctcctaggttcacgccattctcctgcctcagcctccccagtagctggaactacaggcgcctgccaaccacgcccgggtaattttttgtatttttggtagagacggggtttcaccatattagcctggatggtctcaatctcctgacctcatgatccgcccacctcagcctcccaaagtgcaaagtgctgggattacaggcgtgagccactgcacccggccccatatttggccttttgtgtctggctttcacttggcatgtttttgaggttcatccatgttgtagcatatgccagtatttcattccgttttgttgctgaataatatttcatttcacactacattttatttatccattcttctgttgatggacatttgggttgtttgtactttttggctattatgaataatactgctagaatattcatgtacaagttttttatggatgtatattcatttcttttggagtagaaatgctaggtcaaacttcgatttttgttttcctttttttgttgtaaaatatatataacataaagtttaccttttaactgtttttaagtgtgcaattcagtggcattaattatattcacaatattgcactaccatcacaaccatctatttccaaaactttcatctaaaacatagaatctacctattaaacagtaattccccattatcccctctgcctagccgctggtatcctctacttgctgtgtctgcgaattttcctcgtccttttgtgtttggcatgttttgaaggttcatccatgttacagcattttcatttttatggctgactagtattccattatgtgtacaatatataccacattttgttcatctgttgctgggcacttgggttgtttccaccttttggctattgtgagtaatgcagctatgaagactggcgtgtttgagtacctgtttttaattctttggggagtgaaattgctaagttatctggtaacgctatgtttaactttttgaggaatggctgaactgctttccatagaagctataccattttacattcctaccagcaaagcacgaaggttccagtttctccacatcttcaccaacacctgttatcttctgtcttttaaaaaaattctagccatcctaacggccatgaagtagatgaagtaatatctcattgtcattttgatttgtatttcccttatgatattgagcatcttttcatgtgtctgttggtcatttttatgtcttcttggaagaaatggctaaggccttcgcccattttttaattgggtggtttgtctttttgttactgagttgtaagtcctttatatattatgggtgctagaccctcatcatatatatgatttgcagatactttctcccattctggagactgtcttttcactttcttcctggtgacttttgatgcacacaggttctttttttttttttttgagacggagtctcgctctgttgcccagactggagtgccgtgacgtgatcttggctcactgcaacctccgcctgctgggttcaggcaattctcctgcctcagcctcctgagtagctggaattacatgtgcgtgccaccatgcctggctaattttttgtatttttagtagagacggggtttcaccatgctagccagggtagtctcgaactcctgacctcatgatctgcctgccttggcctcccaaagtgctgggattacaagcatgagccaccacgcctggctgacgcacaaaggttcttagttttgatgaagtccattttttccttttgttgcttgtgtctccacttatttttttaaattatgagcatatattaataaaaatttaagataaacagttgaggcactgagaagctgactggcagttttgtgtgggtagggcttgttttaagtaggctttctatggaccccttcttagaatagtggttttaggctgggtgtggtggctcatgcctgtaatcccagcacttttcgaggccaaggcgagaggatctcttgagcccaggagttcaagaccagcctggtcaacatagcgagacccccatctctatcgaaaatataaaaattagccaggcatgatggcatgtgcctgtcattccagctattcgggaggctgacaagcggggaggatcacttgagcccaggaggtcgaggctgcagtgagccaagattgggccactgcactccagcctgggtgacagagtgagaccctgtctcaaaaggaaaaaatcataaggaagagaaaatatacttactgttcattaagcagaagtggatcgtcataaaggtcttcctccttgtctccacattgagtacactgaggaagaggaatggggaagaggaggaatgttggtcctgctgtctcaggggtggcagatgggaagaaaattgatacataagtagatctttgcagtgcaaacctgtgttgttcaagggtcagctgtatttcaccatatattcaatataaaactattgcaatatcttatattccttttcatagtaagtctttaaaacttagtgtatattttactcttacagcacatcttaattcagacaagcaacatttcaggtgcttactaacgacatgtggctagtagctgctgtattgagcacagattgagacagtaagcctggggcagggtgcacagattgcttcatgccaatagggtgattctgtggatttgattccctttaactttcctttactatacttaattctagttatttctagagcaagaagatgtttacctgcaaaggaaattatgtcataccaaacgatattggtattaccttcctgtctacctgggagggaagaggtcttttatgatgtttctggataaccacaccagaactcctgcagttgaacatgaactctagagggggcccttttcatagccctgtatcagttactgtaacttacagacagatggagtcacatagctcatgtcccttatccaaaatacataggtcagggaactcagcagtgcccacccacccaggtggctgcctgtattgactgaattttgcattgccctcttgtctaaacctgaagaactttaaacttgacaatgttcttttcagataatttatttttctgaattgtggttaaatatatataacatgaaaattaccatttcaaccaagtttacagtctgtggcattaaattcacactgttgtataaccatcaccaccgtccatctctagaacttgttttgtcttccccagctgaaattctgtacccattaaacactaactccccattccctcctacccccagccactggcagccaccactctactttgtctctatgagtttgactattctagctacttcatgtaagtggaaccatgcagcatttgttcttctgtgactggcgtatttcactttgcataatgtcttcaaggttcatccatagcatgtgtcacaattccctcccttgttaaggctgagtaatattctattgtatgtagagactacattttatgtatctattcatttgccaatggataggtggattgcatctaccttttggccgttgtgaataatgtttcctgtctcttaagaatgatactcttcattgaaattgcaaggctctctgattaaattctgtacatccactcaaggccctgacttgtgggcacaaaagttgttttttttttgttttgttttgttttgtttttgtgagacagagtcgcactctgttgcccaggctggagtgcagtggtacaatttcggctcaccacaacctccgcctcctgggtgcaagtgattctcgtgcctcagcctcctgagtagctgggattacaggcacatgccaccacgtccagctaatttttgtatttttagtagagacagggtttcaccatgttggccaggctggtcttgaactcctgacctcaagtgatctgcccacctcgccctcccaaaatgctgggattacaggtgtgagccaccacacccagccgtggccacaagttttaaggtcacccctcttaaatctgtgaggaactccaccaaggagataccattcgtagctgggcctcagagaatatctacaggctgggggagaggaaaggcattccagatggagggagcaaagacacagaagcaggaagggcataacaagtcacgccaaacctaatggcacaaaacaaccattttattatggtcacagattctgtatgtcagcagttcagaaagagcgtggcaggaacatcttgtttcttctccatacagcctggggcttcagatgggaaggctcaagggcttggggtgacatgacacctgaggtatggaattacctaaaggtagttaacgtgtgtgcctggcacttaaacaaggatgactcaaaggccaggactgccagccacagcccctgtgtatgtccctccacgtgcctttgctccctcgcagcatggcagccttcttgcatggtggctccaggcccaagtgtgtgttgaaccctgaggctgcatccttttctgacctagccctggaagtcacgtagtaactcttccactgtatttgactggttacaagcaagtcacaagcccaaggcggggcttcaggttgaaggagggaagtattagaccctacctcttcatagggaagtatcaaggtttcagaagaggaggagggacaggagagactgttggggccttcagaaaatacaatctgccacagcaaagaagcagttacatccactgttaagctgcagtaaaaagaacaattttatattgaacgctatgtcttgaacactctgtctactttgatacatagagatctagttcatttctgttaaattcatacacatatactacattccctttgaccattttcctactgatgtttcagggttctttttttttttttttttttttttgagatggagtttctctcgttacctagtctggagtgcaatggcgcgatctcggctcaccgcaacctccacctcccgggttcaagcaattctcctgcctcagcctcccaagtagctgggattacaggcatgtgccaccacgcccagctaattttttgtatttttagtagagatgaggtttctccatattggtcaggctggtcttgaactcccgacctcaggtgatccgcctgccttggcctcccaaagtgctgggattataggcgtgagccactgcactggggccattttggtgttttcagcgtttcatcaacactctggtgcatgtctctctgccatgaggtgggagaacttctctggagtacttaccttggacagaatcactggatgggaggaaacacatattttaataaatgctgtctgattgctctccaaagaggttatatcagtttatccttacaccaagtgtttgaaagttgccatttccctagtatacttactgatacttgatcttgttggactttaaatcacttacttggtaagtgaaaaattaaaaccagttgatttatttcacatttacttggttactagagaagctgtgcatattttaattttatttatattggccatttaaacttctgtgaattacttgtatactctattcattcttctattggattctcagtatttttcaaattgtctgggcatggtggctcatgcctttaatcccagcactttgggaggctgacgtgggaagattgcttgagttcaggagttcaaaactagcctggacaacgtagtgagacctcatgtctactacaaatgaaaatttaaaaataaacaattggccaggcgcagtggctcatgcttataatcccagcactttgggaggccgaggcgggaggatcacctgagatcaggagtttgagaccagcctggccaacacagtgaaaccccgtctctactgaaaatacaaaaattagccgggcgtggtggcaggcgcctgtaatcccagctactcgggaggctgaggcaggagaatcgcttgaacccaggaggcagaggttgcactgagccgagatcacaccactgtactccagcctgggtgacagagctagactccatctcaaaaaataaataaataataataataataaattagctgagcattgtggtgtacacctgtagtcccagttactcaggagactaaggtgagaggattgctcgagtgtgggagagtaaggctatagtgaggtatgattgtgccactgcactgcagcctggacaacagagtgagaccctgtctcaaaaaaacaaaaagtactttaaaaatcaatttgtagttctttatatatatggatagttacactgtgcctattataatatgacgaatattttctgccacattattgcttgtctttttttttttttgagacagagttttgctcttgttgcccaggctggagtgcaatagcgtgatctcagatcactgcaacctctgcctcccgggttcaagcgattctcttgtcccagcctcctgagcagctgggattacaggcatgcgccaccacgccccactaattttgtatttttagtgttggtcaggctggtctcgaactcctgacctcaagtgatccgcctgcctcagcctcccaaagtgctgggattacaggcatgagccaccgcgcctggcctgaagtctctttctttcttcagtgtttagtgatgcagattccatacttacgcaggggtatgtttctgggctctgttctgttcctcttttggctgcttctatgttaatacaactattttcatttatttgttatttaattttatttttttggcgagtctcactctggcaccccatctgaagtgcagtggcatgatctcagctcactgcaacctctgcttcccgggttcaagcgattctcctgcctcagcctcctgagtagctgggactacaggtgcatgcaaccacacctggctaattttttgtatttttagtagaaatgaggtttcgccatgttggccaagctggtctcaaactcctgacctcagctgacccacctgcctcggcctcccaaagtgctgggattacaggtgagagccactgagcctggctgactcctggctaatttttgtatttctactagagatggggtttcaccgtgttggccaggctggtttggaattcctgacctcaagtgatccgcctgcctcggcctcccaaagtcctaggattacaggtgtgagccactgcgcccagctgacacctggctaatttttgtatttctagtagagatggggtttcaccatgttggccaggctggtttggaattcctgacctcaagtgatccacccacctcggcctcccaaagtgctgggattacaggagtgagccaccgtgcccagctgtattaatataactttcaattaccatggctttgtagcacgccttggtatctggtgagtgctccttctttatcctttttgtgcagaaagaaaaactattcttgtatcttcattcttccaatataaattatagaatttgtatatcaagttcctcagaaaaattctgttgggatgaaaactggaagtagagtaagcttatagattaattggggaagaactgataactaaaatattgaatcttctcaactataagtcaactttatcactccatttattcaagaatcctattatatccttctatccaagtttgagtaatttctctatgaaggtctttcatattttaattttcatttaatttaattttttgagaaaaggtctcactctgtcactgaggctggagcacaatggcatgatcttggctcattacagcctcagcctcctgggctcaggtgatcctcctgcctcagctttccaagtagctgaggctacaggtgtgtaccaccatgctcagctaactttgagatttttttgtagagatggggtctcactatgttgtccaggctggtcttgaactcctgggctcaagcagtcctcctgctttagcctcccaaagtgctgggattacacccatgagccactgcacctggcctcctgcatatttttattagatttattccttagtactttctagtagtttttgttgagttttgtgaaattgatcatttaaaaaatatttgcggccgggtgcagtggctcactcctataatcccagcactttggaaggccgaggtaggcagatcatttgaggtcaggagctcgagaccagcctggccaacatggtgaaaccccatctctactaaaaatacaaaaatcagctgggtgtcatcgtgggcacctgtaatctcggctacttctgaggctgaggcaggagaatcacttgaacccgggaggtggaggttgcggtgagccgagatcatgccaccgcgctccagcctgggcgacagagggagaccctgtctcaaaaaaaaaaaaaaaaatgcatagtctaattagtcacagctagtaggtagaaatgtttaatccttgtatgttgatcttgtgtccggcaaccaagagaatccaacatggttctcttggatttgcatcataaatgattatattgtttgctaagaatgccaattttgtctctctgatttttttttttttttttttttgagagagagtcttgctctgttgcccaggctagagtgcagtggcgtgatctcggctcactgcaagctccacctcccggattcatgccattctcctgcctcagcctcccaagtagctgggactacaggtgcccaccacctcgcccagctaattttttgtaattttaatagagatggagtttcaccgtgttagccaggatggtcttgatctcctgacctcgtgatccgcccaccgcagcctcccaaagtgctgggattacaggcgtgagccaccatgcctggccccttgtctctctgatcttattgatatcttgtccaactgtatggcaaggtgcttcaggacagtgtggaataataggtccatatctctaccttgtcctgaccgtcattcactcagtgaatatttattgagtacctaccttatgccaggtactgttgtagcttctggggatgtcgcagtgaacaaaacaaaatccctcccctcatgggaagggataccaaataaccaaatgtggtaagcagtaaccaggtgagcagtaacaaataaccaggaagggtaagagcagtatagtgtccactgcacaggcagggtcggtgttgctgttgcattcagggtggtcagggagggcatccctggccaggtgacctgtgagcagaaacctgaagagagggagagaggaagtctgtagagatctggggagaagaacttttcaggcagagggagcagcacctgactgatgggcaagtgcttgacatgcgcaaggctgagggaagccaccagtgggctgcagccatgagccagaggagagggatgggagatgaagtcagactgggggcatctcagatcacaggggtctcagaggcccttttttttttttttttttttttttttttttttttttttgagatggggtctcactctttcacccaggctggagtgcagcggcgcaattttggctgactgtaacctccacctgccaggctcaagcaatcctcccacctcagcctcccaagtagctcggaccacaggcccgccgcacctggctgggagttttaccaagttgcccaggctggtcttgaactcctgaactcaagtcatctgcccatcagaggccattattaaaggcttggttttactccaagaagagctcatcagttctgagtgctgcaacttgacatacttttttaaagaattaatctgggccgggcgcggtggctcacgcctgtaatcccagcactttgggaggccgaggcgggtggatcatgaggtcaggagatcgagaccatcctggctaacaaggtgaaaccccgtctctactaaaaatacaaaaaattagccgggcgcggtggcgggcgcctgtagtcccagctactcgggaggctgaggcaggagaatggcgtgaacccgggaagcggagcttgcagtgagccgagattgcgccactgcagtccgcaatccggcctgggcgacagagcgagactccgtctcaaaaaaaaaaaaaaaaaaaaaaaaagaattaatctggcttctctatccaaatgagaacctctgtgtaccttccattggcacacaaatggaagctgggagatgagttaggaggatttaacaatctgtgtaagagagactttaatggaggaatcagactgtggatatatcttgaagatagaacaggatttctcgacagattagatatgggtaagagtaagggagccaaacatggcttggagtctgagtgaagaagaggatggcattgccactgaaatggggaaaactataggaaatgtcgatctgggggaaagtcaggagtttggtttggaacatgttaaatttgatatgctttgttagacatcagaatagagaagtcaagcaggcagttggatatatgagtctggggataggtccagtttgaagattctatctgggagtcaccagagtatagattaagatgaataagatgagaatgcctaataagtagagaagacaagctgtctaaagactgatcccagagacatgaacacttagcggtggaaagggaggaataaacagcaagatcaaaggaagagcaattggaagccacctgaacaacgttctcaagggagaatccagtgtcaaaggcagctgaagggctcaccaagccagatctagaaaggcagaggtcattagatacataaagggccattttggtggaattgtgatggcagaagcatgggtaaggtagcctgagaggaggaggattaagagaagagaaaacaggagagtaattggagaccacatgcatggattttcctgtacaaggaagcagagaaatggagggatgtagggtcaaaggagacagctgtttcgttgttgttgctgttgttttgagatagggtctcactttgtcacccaggctgaagtgcagtggtgtgatctcagctcaatgcagccttgaactcctgggctccactgatcctcccaccccagcctcccaagtagctgggaacacaggggtgcaccaccacacctgcctaattaaaaatttcttttttatagagatgcaatctcgctttgttgcctaggctggtctcaaactcctgggtttaaacaatccccccatctcagcctcccacagtgttaggattacaggcatgagccaccgcgcctgtccttgttttgtttttttaatggagcaatataagcatgtttatatgttgctgagaatgaccttgttagagaaagggagcttattatgctggagagaaaacaggcaactgttggggttatccttaggtgagaaggaatcgaattagtgcccaagtagagaacagatagcttctccacagtgacaggagaaaggccatgtctgaggagaggtgaggtgaggcagatgggagcagagtcatcacctcagggtaaggaggtggagaggacgcgtaggacgtctctggagagcagatttgaaactggcatccaggagagaggaggcccaccagtcactccaaggaccactgagattaggtgtgaaggcagaactggaatgtgggagggatgcgtccatccaaaagatgagcttgagtttactgttttccattcattgcatgtctgtatcacaccactttctataaaatggtttgtccatttctccttaaaaaacttttgttttatatattttgaagatattggatggatcaagtttagaattgtaatattcctggcagatgttcactgatccattctgtttttcagaatctctgtttgtgtttgcctaagagttatatgtattatgactattacagtagcagacttcctttgattagtgtttgtctggtatatctctttccatccatttactttttacctttcactgtccttattaatcatgtctcttgtaatcagcatatacctggattttatgttttatccagtttcctgatttttattttagaaataggtagtgtagtccatttttacgaggtgacttctatatatttaggttcattcttaccatgttattttgggggatttgtgctttttaaatgtattttaatttatttatttaaatagagatggtctctcactatgttgcccaggctggtctcaaacttctagccttaagcagtcctcctacctgggcctcccaaagtgttggaattacaggcgtgagccactgagcccagcctccttttctgaggtgccttttttcctctttcttcccttcttttggattaactcctctcctcactccttttacaaaccctactagttttgaggctatattaattgggattacatttgcctacaaataacactaaaacatttctaaaaagtgatttaaacaagactgtttatttcattctcaagaatgtctcagatagtgatggtggagccacaggcttttttgtttccttgcagtttgatgccattaattggctttcattgataagatcttctcaactgtcagagtgctgctggatcccagcatcctaagtgcattccagccagcaaaggaaccaacagcaaaggagaacagctggcccacgcactgcttctgcttccactgctttggccagaatttagacatacaactatgcatatcttgctgcaggggagtctaggaaatgcttgattccaggctatgtgcccagttaaaaataaaaggtccacacagatcacttgttttcagaagcctatgctgtgcttagtagacagtgtgcacattatagagagttggcataatgctaacaacagaatccttattctaatcctgatcctagtataacttgttgtaggattctagtacttcgcatgccatgcctcagagttttaatgtgacagtactggctgggcacggtggctcatgcctgtaatcccagcactttgggagccgaggtgggtggattgcctgaactcaggagttcgagaccagcctgggcaacatggtgaaactccatctttactaaaatacaaaaagttagcggggcgtggtggcgtgcacctgtaatcccagctacttggaaggctgagaccggagaatcacttgaacccgggaggcagaggttgcagtgagcccagattgcgccattgcattccagtctgggcaacagagctagactccgtctcaggaaaaaaaaaaaaaaaaaaaaaaattgacagtactttgtcctgggaaattcacactatgcctaaaggcttgctgtgtttcatttcctctgaataaagttgctgttagatatgaaggaaaaaaaatcaaaagttctgtgtatggctgggcgtagtggcttatgcctgtagtcccaacactttgggaggctgaggcaggtggatcacttgatcccaaaagttcaagactagcctgggcaacataatgaaaccccacgaaacaccatgcctggctaattttatattttgtatctctataaaaaatacagccgggtgcggtggctcacgcctgacctcgtgatccgcccgcctcggcctcccagagtgctgggattacaggcatgagccactgcgcctggccgaacctgtgtcttaaaaaaaaagaaagaaaaggctggacgcagtgcctcacgcctgtaatcccagcactttcggaggccgaggtgggcagatcacttgaggccaggagtttgagactagcctggccaacatgatgaaatcccgtctctacttaaaatataaaaatcagccaggcgtggtgcgggcgcctgtaatcccagctactggggaggctgaggcatgagaattgcatgaacctgggaggtggaggttgcagtgagctgagattgcgccactgcactccagtctggacaacagagcaaagcgattctcctgcctcaacctcccgagtagcttggactacaggcatgtgccaccacacccggttattttttgtatttttagtagagatgaggtttcaacgtgttggccaggttgacctcaaactcctgacctcaggtgatccgcccacctcagcctcccaaagtgctgggattacaggtgtgagccaccgtgcccggcctagtagtttcttaatgttttgaaaatgagttgttgttactgattttttttttttaatttgttggtggttgggagaagtcagcttgtctgacactcactggtttgtcttagccagaatcagaagtgattacaattgtcaatgttgaatcagtcttgcattctcagaataaacccagctaaatttatgatatattattttagtacactgccgggtttaatatgtgatttaataattttgtctttgttcatgagacattggcttgtaatctttcctttctatccttgtcctgttgtagttttaaggttctctagcttcaaaaatcagtgtgggacgtttcctcttctcatagtctctgaaggaatttaacaacaggattttgccaggtgcagtggcccacacctgtaatcctgcactttgggaggccaaggtggacagctcacggtcaggagttcaagaccagcctggccaacatggtgaaaccccatttctacaaaaatacaaaaattagctgggcatgatggcgggtgcctgtaatccgagctacactcaggatgctgaggcaggagaattgcttgaactcgggaggcagaggttgcagtgagctgagatcccaccactttactccagcctgggcaacaaaacaagacaagactcggtctcaaaaaaaaaaaaaccaggattttatttcatggttgtgtataactctagttttgagtatcttttctagtatagctatatcacattatcctttactcattcctaatctttatttgcatctgtcttcttttgatcttgat
